United States Patent Application Publication US 2019/0016770 A1 - sequence listing, part 7

SEQ ID NO: 81817 - protein, 32 aa, Artificial Sequence; identical to SEQ ID NO: 49048
  GFR-binding peptide
  MOD_RES (1)..(32): Xaa is C or S

SEQ ID NO: 81818 - protein, 37 aa, Artificial Sequence; identical to SEQ ID NO: 17989
  GFR-binding peptide
  MOD_RES (35)..(35): Xaa is C or S
  MOD_RES (11)..(12)..(13)..(14)..(15): Xaa is A or G
  MOD_RES (16)..(17)..(18)..(19): Xaa is A or G or is absent

SEQ ID NO: 81819 - protein, 39 aa, Artificial Sequence; identical to SEQ ID NO: 17990
  GFR-binding peptide
  MOD_RES (2)..(39): Xaa is C or S
  MOD_RES (15)..(16)..(17)..(18)..(19): Xaa is A or G
  MOD_RES (20)..(21)..(22)..(23): Xaa is A or G or is absent

SEQ ID NO: 81820 - protein, 40 aa, Artificial Sequence; identical to SEQ ID NO: 17991
  GFR-binding peptide
  MOD_RES (1)..(35): Xaa is C or S
  MOD_RES (13)..(14)..(15)..(16)..(17): Xaa is A or G
  MOD_RES (18)..(19)..(20)..(21): Xaa is A or G or is absent

SEQ ID NO: 81821 - protein, 40 aa, Artificial Sequence; identical to SEQ ID NO: 49051
  GFR-binding peptide
  MOD_RES (1)..(34)..(35): Xaa is C or S
  MOD_RES (12)..(13)..(14)..(15)..(16): Xaa is A or G
  MOD_RES (17)..(18)..(19)..(20): Xaa is A or G or is absent

SEQ ID NO: 81822 - protein, 39 aa, Artificial Sequence; identical to SEQ ID NO: 17168
  GFR-binding peptide
  MOD_RES (1)..(3): Xaa is C or S

SEQ ID NO: 81823 - protein, 38 aa, Artificial Sequence; identical to SEQ ID NO: 49056
  GFR-binding peptide
  MOD_RES (1)..(32)..(33): Xaa is C or S

SEQ ID NO: 81824 - protein, 35 aa, Artificial Sequence; identical to SEQ ID NO: 46497
  GFR-binding peptide
  MOD_RES (33)..(34): Xaa is C or S
  MOD_RES (11)..(12)..(13)..(14)..(15): Xaa is A or G
  MOD_RES (16)..(17)..(18)..(19): Xaa is A or G or is absent

SEQ ID NO: 81825 - protein, 39 aa, Artificial Sequence; identical to SEQ ID NO: 17992
  GFR-binding peptide
  MOD_RES (36)..(36): Xaa is C or S

SEQ ID NO: 81826 - protein, 40 aa, Artificial Sequence; identical to SEQ ID NO: 17169
  GFR-binding peptide
  MOD_RES (2)..(4): Xaa is C or S
  MOD_RES (17)..(18)..(19)..(20)..(21): Xaa is A or G
  MOD_RES (22)..(23)..(24)..(25): Xaa is A or G or is absent

SEQ ID NO: 81827 - protein, 36 aa, Artificial Sequence; identical to SEQ ID NO: 49058
  GFR-binding peptide
  MOD_RES (1)..(3)..(36): Xaa is C or S
  MOD_RES (14)..(15)..(16)..(17)..(18): Xaa is A or G
  MOD_RES (19)..(20)..(21)..(22): Xaa is A or G or is absent

SEQ ID NO: 81828 - protein, 36 aa, Artificial Sequence; identical to SEQ ID NO: 17170
  GFR-binding peptide
  MOD_RES (2)..(36): Xaa is C or S
  MOD_RES (14)..(15)..(16)..(17)..(18): Xaa is A or G
  MOD_RES (19)..(20)..(21)..(22): Xaa is A or G or is absent

SEQ ID NO: 81829 - protein, 34 aa, Artificial Sequence; identical to SEQ ID NO: 46509
  GFR-binding peptide
  MOD_RES (2)..(33)..(34): Xaa is C or S

SEQ ID NO: 81830 - protein, 43 aa, Artificial Sequence; identical to SEQ ID NO: 17993
  GFR-binding peptide
  MOD_RES (2)..(4)..(41): Xaa is C or S
  MOD_RES (17)..(18)..(19)..(20)..(21): Xaa is A or G
  MOD_RES (22)..(23)..(24)..(25): Xaa is A or G or is absent

SEQ ID NO: 81831 - protein, 35 aa, Artificial Sequence; identical to SEQ ID NO: 47793
  GFR-binding peptide
  MOD_RES (31)..(32): Xaa is C or S

SEQ ID NO: 81832 - protein, 35 aa, Artificial Sequence; identical to SEQ ID NO: 46512
  GFR-binding peptide
  MOD_RES (1)..(32)..(33): Xaa is C or S

SEQ ID NO: 81833 - protein, 34 aa, Artificial Sequence; identical to SEQ ID NO: 17175
  GFR-binding peptide
  MOD_RES (1)..(1): Xaa is C or S
  MOD_RES (13)..(14)..(15)..(16)..(17): Xaa is A or G
  MOD_RES (18)..(19)..(20)..(21): Xaa is A or G or is absent

SEQ ID NO: 81834 - protein, 41 aa, Artificial Sequence; identical to SEQ ID NO: 49075
  GFR-binding peptide
  MOD_RES (2)..(4)..(37)..(38): Xaa is C or S
  MOD_RES (15)..(16)..(17)..(18)..(19): Xaa is A or G
  MOD_RES (20)..(21)..(22)..(23): Xaa is A or G or is absent

SEQ ID NO: 81835 - protein, 36 aa, Artificial Sequence; identical to SEQ ID NO: 50313
  GFR-binding peptide
  MOD_RES (2)..(4)..(35)..(36): Xaa is C or S

SEQ ID NO: 81836 - protein, 39 aa, Artificial Sequence; identical to SEQ ID NO: 46519
  GFR-binding peptide
  MOD_RES (1)..(3)..(34)..(35): Xaa is C or S

SEQ ID NO: 81837 - protein, 36 aa, Artificial Sequence; identical to SEQ ID NO: 49077
  GFR-binding peptide
  MOD_RES (2)..(33)..(34): Xaa is C or S

SEQ ID NO: 81838 - protein, 36 aa, Artificial Sequence; identical to SEQ ID NO: 17177
  GFR-binding peptide
  MOD_RES (36)..(36): Xaa is C or S

SEQ ID NO: 81839 - protein, 39 aa, Artificial Sequence; identical to SEQ ID NO: 47797
  GFR-binding peptide
  MOD_RES (2)..(4)..(35)..(36): Xaa is C or S

SEQ ID NO: 81840 - protein, 40 aa, Artificial Sequence; identical to SEQ ID NO: 47798
  GFR-binding peptide
  MOD_RES (1)..(3)..(36)..(37): Xaa is C or S
  MOD_RES (14)..(15)..(16)..(17)..(18): Xaa is A or G
  MOD_RES (19)..(20)..(21)..(22): Xaa is A or G or is absent

SEQ ID NO: 81841 - protein, 38 aa, Artificial Sequence; identical to SEQ ID NO: 17178
  GFR-binding peptide
  MOD_RES (34)..(34): Xaa is C or S

SEQ ID NO: 81842 - protein, 41 aa, Artificial Sequence; identical to SEQ ID NO: 17995
  GFR-binding peptide
  MOD_RES (1)..(35): Xaa is C or S

SEQ ID NO: 81843 - protein, 35 aa, Artificial Sequence; identical to SEQ ID NO: 47804
  GFR-binding peptide
  MOD_RES (2)..(35): Xaa is C or S
  MOD_RES (13)..(14)..(15)..(16)..(17): Xaa is A or G
  MOD_RES (18)..(19)..(20)..(21): Xaa is A or G or is absent

SEQ ID NO: 81844 - protein, 44 aa, Artificial Sequence; identical to SEQ ID NO: 17997
  GFR-binding peptide
  MOD_RES (1)..(3)..(40): Xaa is C or S

SEQ ID NO: 81845 - protein, 34 aa, Artificial Sequence; identical to SEQ ID NO: 47809
  GFR-binding peptide
  MOD_RES (1)..(34): Xaa is C or S
  MOD_RES (12)..(13)..(14)..(15)..(16): Xaa is A or G
  MOD_RES (17)..(18)..(19)..(20): Xaa is A or G or is absent

SEQ ID NO: 81846 - protein, 42 aa, Artificial Sequence; identical to SEQ ID NO: 17998
  GFR-binding peptide
  MOD_RES (1)..(38): Xaa is C or S
  MOD_RES (14)..(15)..(16)..(17)..(18): Xaa is A or G
  MOD_RES (19)..(20)..(21)..(22): Xaa is A or G or is absent

SEQ ID NO: 81847 - protein, 38 aa, Artificial Sequence; identical to SEQ ID NO: 18000
  GFR-binding peptide
  MOD_RES (2)..(4): Xaa is C or S
  MOD_RES (17)..(18)..(19)..(20)..(21): Xaa is A or G
  MOD_RES (22)..(23)..(24)..(25): Xaa is A or G or is absent

SEQ ID NO: 81848 - protein, 30 aa, Artificial Sequence; identical to SEQ ID NO: 50331
  GFR-binding peptide

SEQ ID NO: 81849 - protein, 38 aa, Artificial Sequence; identical to SEQ ID NO: 17181
  GFR-binding peptide
  MOD_RES (1)..(35): Xaa is C or S

SEQ ID NO: 81850 - protein, 35 aa, Artificial Sequence; identical to SEQ ID NO: 18003
  GFR-binding peptide
  MOD_RES (34)..(34): Xaa is C or S
  MOD_RES (12)..(13)..(14)..(15)..(16): Xaa is A or G
  MOD_RES (17)..(18)..(19)..(20): Xaa is A or G or is absent

SEQ ID NO: 81851 - protein, 37 aa, Artificial Sequence; identical to SEQ ID NO: 18004
  GFR-binding peptide
  MOD_RES (2)..(4): Xaa is C or S

SEQ ID NO: 81852 - protein, 36 aa, Artificial Sequence; identical to SEQ ID NO: 46538
  GFR-binding peptide
  MOD_RES (2)..(4): Xaa is C or S
  MOD_RES (15)..(16)..(17)..(18)..(19): Xaa is A or G
  MOD_RES (20)..(21)..(22)..(23): Xaa is A or G or is absent

SEQ ID NO: 81853 - protein, 37 aa, Artificial Sequence; identical to SEQ ID NO: 18005
  GFR-binding peptide
  MOD_RES (2)..(4): Xaa is C or S
  MOD_RES (16)..(17)..(18)..(19)..(20): Xaa is A or G
  MOD_RES (21)..(22)..(23)..(24): Xaa is A or G or is absent

SEQ ID NO: 81854 - protein, 37 aa, Artificial Sequence; identical to SEQ ID NO: 17182
  GFR-binding peptide
  MOD_RES (35)..(35): Xaa is C or S

SEQ ID NO: 81855 - protein, 41 aa, Artificial Sequence; identical to SEQ ID NO: 17183
  GFR-binding peptide
  MOD_RES (2)..(39): Xaa is C or S

SEQ ID NO: 81856 - protein, 37 aa, Artificial Sequence; identical to SEQ ID NO: 17184
  GFR-binding peptide
  MOD_RES (1)..(1): Xaa is C or S
  MOD_RES (14)..(15)..(16)..(17)..(18): Xaa is A or G
  MOD_RES (19)..(20)..(21)..(22): Xaa is A or G or is absent

SEQ ID NO: 81857 - protein, 35 aa, Artificial Sequence; identical to SEQ ID NO: 18006
  GFR-binding peptide
  MOD_RES (35)..(35): Xaa is C or S
  MOD_RES (11)..(12)..(13)..(14)..(15): Xaa is A or G
  MOD_RES (16)..(17)..(18)..(19): Xaa is A or G or is absent

SEQ ID NO: 81858 - protein, 38 aa, Artificial Sequence; identical to SEQ ID NO: 18008
  GFR-binding peptide
  MOD_RES (36)..(36): Xaa is C or S
  MOD_RES (12)..(13)..(14)..(15)..(16): Xaa is A or G
  MOD_RES (17)..(18)..(19)..(20): Xaa is A or G or is absent

SEQ ID NO: 81859 - protein, 41 aa, Artificial Sequence; identical to SEQ ID NO: 18009
  GFR-binding peptide
  MOD_RES (1)..(3)..(40): Xaa is C or S

SEQ ID NO: 81860 - protein, 33 aa, Artificial Sequence; identical to SEQ ID NO: 50345
  GFR-binding peptide
  MOD_RES (31)..(32): Xaa is C or S

SEQ ID NO: 81861 - protein, 38 aa, Artificial Sequence; identical to SEQ ID NO: 17187
  GFR-binding peptide
  MOD_RES (2)..(4)..(38): Xaa is C or S
  MOD_RES (16)..(17)..(18)..(19)..(20): Xaa is A or G
  MOD_RES (21)..(22)..(23)..(24): Xaa is A or G or is absent

SEQ ID NO: 81862 - protein, 37 aa, Artificial Sequence; identical to SEQ ID NO: 50346
  GFR-binding peptide
  MOD_RES (2)..(33)..(34): Xaa is C or S

SEQ ID NO: 81863 - protein, 41 aa, Artificial Sequence; identical to SEQ ID NO: 50347
  GFR-binding peptide
  MOD_RES (1)..(3)..(36)..(37): Xaa is C or S
  MOD_RES (14)..(15)..(16)..(17)..(18): Xaa is A or G
  MOD_RES (19)..(20)..(21)..(22): Xaa is A or G or is absent

SEQ ID NO: 81864 - protein, 43 aa, Artificial Sequence; identical to SEQ ID NO: 49099
  GFR-binding peptide
  MOD_RES (2)..(4)..(37)..(38): Xaa is C or S
  MOD_RES (15)..(16)..(17)..(18)..(19): Xaa is A or G
  MOD_RES (20)..(21)..(22)..(23): Xaa is A or G or is absent

SEQ ID NO: 81865 - protein, 39 aa, Artificial Sequence; identical to SEQ ID NO: 17188
  GFR-binding peptide
  MOD_RES (2)..(36): Xaa is C or S

SEQ ID NO: 81866 - protein, 34 aa, Artificial Sequence; identical to SEQ ID NO: 18010
  GFR-binding peptide
  MOD_RES (12)..(13)..(14)..(15)..(16): Xaa is A or G
  MOD_RES (17)..(18)..(19)..(20): Xaa is A or G or is absent

SEQ ID NO: 81867 - protein, 35 aa, Artificial Sequence; identical to SEQ ID NO: 18011
  GFR-binding peptide
  MOD_RES (35)..(35): Xaa is C or S
  MOD_RES (11)..(12)..(13)..(14)..(15): Xaa is A or G
  MOD_RES (16)..(17)..(18)..(19): Xaa is A or G or is absent

SEQ ID NO: 81868 - protein, 35 aa, Artificial Sequence; identical to SEQ ID NO: 46548
  GFR-binding peptide
  MOD_RES (31)..(32): Xaa is C or S

SEQ ID NO: 81869 - protein, 38 aa, Artificial Sequence; identical to SEQ ID NO: 18012
  GFR-binding peptide
  MOD_RES (1)..(38): Xaa is C or S

SEQ ID NO: 81870 - protein, 36 aa, Artificial Sequence; identical to SEQ ID NO: 17190
  GFR-binding peptide
  MOD_RES (33)..(33): Xaa is C or S
  MOD_RES (11)..(12)..(13)..(14)..(15): Xaa is A or G
  MOD_RES (16)..(17)..(18)..(19): Xaa is A or G or is absent

SEQ ID NO: 81871 - protein, 33 aa, Artificial Sequence; identical to SEQ ID NO: 18014
  GFR-binding peptide

SEQ ID NO: 81872 - protein, 32 aa, Artificial Sequence; identical to SEQ ID NO: 46553
  GFR-binding peptide
  MOD_RES (31)..(32): Xaa is C or S

SEQ ID NO: 81873 - protein, 42 aa, Artificial Sequence; identical to SEQ ID NO: 18015
  GFR-binding peptide
  MOD_RES (1)..(3)..(40): Xaa is C or S
  MOD_RES (16)..(17)..(18)..(19)..(20): Xaa is A or G
  MOD_RES (21)..(22)..(23)..(24): Xaa is A or G or is absent

SEQ ID NO: 81874 - protein, 36 aa, Artificial Sequence; identical to SEQ ID NO: 17191
  GFR-binding peptide
  MOD_RES (1)..(3): Xaa is C or S
  MOD_RES (15)..(16)..(17)..(18)..(19): Xaa is A or G
  MOD_RES (20)..(21)..(22)..(23): Xaa is A or G or is absent

SEQ ID NO: 81875 - protein, 41 aa, Artificial Sequence; identical to SEQ ID NO: 18016
  GFR-binding peptide
  MOD_RES (2)..(4)..(41): Xaa is C or S

SEQ ID NO: 81876 - protein, 41 aa, Artificial Sequence; identical to SEQ ID NO: 18017
  GFR-binding peptide
  MOD_RES (1)..(38): Xaa is C or S

SEQ ID NO: 81877 - protein, 42 aa, Artificial Sequence; identical to SEQ ID NO: 47829
  GFR-binding peptide
  MOD_RES (2)..(4)..(37)..(38): Xaa is C or S
  MOD_RES (15)..(16)..(17)..(18)..(19): Xaa is A or G
  MOD_RES (20)..(21)..(22)..(23): Xaa is A or G or is absent

SEQ ID NO: 81878 - protein, 39 aa, Artificial Sequence; identical to SEQ ID NO: 50359
  GFR-binding peptide
  MOD_RES (33)..(34): Xaa is C or S
  MOD_RES (11)..(12)..(13)..(14)..(15): Xaa is A or G
  MOD_RES (16)..(17)..(18)..(19): Xaa is A or G or is absent

SEQ ID NO: 81879 - protein, 32 aa, Artificial Sequence; identical to SEQ ID NO: 49108
  GFR-binding peptide
  MOD_RES (31)..(32): Xaa is C or S

SEQ ID NO: 81880 - protein, 38 aa, Artificial Sequence; identical to SEQ ID NO: 18018
  GFR-binding peptide
  MOD_RES (1)..(38): Xaa is C or S
  MOD_RES (14)..(15)..(16)..(17)..(18): Xaa is A or G
  MOD_RES (19)..(20)..(21)..(22): Xaa is A or G or is absent

SEQ ID NO: 81881 - protein, 42 aa, Artificial Sequence; identical to SEQ ID NO: 18019
  GFR-binding peptide
  MOD_RES (2)..(39): Xaa is C or S

SEQ ID NO: 81882 - protein, 36 aa, Artificial Sequence; identical to SEQ ID NO: 18020
  GFR-binding peptide
  MOD_RES (33)..(33): Xaa is C or S
  MOD_RES (11)..(12)..(13)..(14)..(15): Xaa is A or G
  MOD_RES (16)..(17)..(18)..(19): Xaa is A or G or is absent

SEQ ID NO: 81883 - protein, 41 aa, Artificial Sequence; identical to SEQ ID NO: 17195
  GFR-binding peptide
  MOD_RES (2)..(39): Xaa is C or S
  MOD_RES (15)..(16)..(17)..(18)..(19): Xaa is A or G
  MOD_RES (20)..(21)..(22)..(23): Xaa is A or G or is absent

SEQ ID NO: 81884 - protein, 40 aa, Artificial Sequence; identical to SEQ ID NO: 17196
  GFR-binding peptide
  MOD_RES (2)..(39): Xaa is C or S
  MOD_RES (15)..(16)..(17)..(18)..(19): Xaa is A or G
  MOD_RES (20)..(21)..(22)..(23): Xaa is A or G or is absent

SEQ ID NO: 81885 - protein, 43 aa, Artificial Sequence; identical to SEQ ID NO: 17197
  GFR-binding peptide
  MOD_RES (2)..(39): Xaa is C or S

SEQ ID NO: 81886 - protein, 42 aa, Artificial Sequence; identical to SEQ ID NO: 46560
  GFR-binding peptide
  MOD_RES (1)..(3)..(36)..(37): Xaa is C or S
  MOD_RES (14)..(15)..(16)..(17)..(18): Xaa is A or G
  MOD_RES (19)..(20)..(21)..(22): Xaa is A or G or is absent

SEQ ID NO: 81887 - protein, 39 aa, Artificial Sequence; identical to SEQ ID NO: 17198
  GFR-binding peptide
  MOD_RES (1)..(35): Xaa is C or S

SEQ ID NO: 81888 - protein, 37 aa, Artificial Sequence; identical to SEQ ID NO: 17199
  GFR-binding peptide
  MOD_RES (35)..(35): Xaa is C or S

SEQ ID NO: 81889 - protein, 40 aa, Artificial Sequence; identical to SEQ ID NO: 47837
  GFR-binding peptide
  MOD_RES (1)..(3)..(36)..(37): Xaa is C or S
  MOD_RES (14)..(15)..(16)..(17)..(18): Xaa is A or G
  MOD_RES (19)..(20)..(21)..(22): Xaa is A or G or is absent

SEQ ID NO: 81890 - protein, 34 aa, Artificial Sequence; identical to SEQ ID NO: 18025
  GFR-binding peptide
  MOD_RES (1)..(1): Xaa is C or S

SEQ ID NO: 81891 - protein, 35 aa, Artificial Sequence; identical to SEQ ID NO: 17200
  GFR-binding peptide
  MOD_RES (1)..(1): Xaa is C or S
  MOD_RES (14)..(15)..(16)..(17)..(18): Xaa is A or G
  MOD_RES (19)..(20)..(21)..(22): Xaa is A or G or is absent

SEQ ID NO: 81892 - protein, 38 aa, Artificial Sequence; identical to SEQ ID NO: 17201
  GFR-binding peptide
  MOD_RES (1)..(38): Xaa is C or S

SEQ ID NO: 81893 - protein, 40 aa, Artificial Sequence; identical to SEQ ID NO: 50369
  GFR-binding peptide
  MOD_RES (2)..(4)..(35)..(36): Xaa is C or S

SEQ ID NO: 81894 - protein, 41 aa, Artificial Sequence; identical to SEQ ID NO: 18026
  GFR-binding peptide
  MOD_RES (2)..(4)..(38): Xaa is C or S
  MOD_RES (16)..(17)..(18)..(19)..(20): Xaa is A or G
  MOD_RES (21)..(22)..(23)..(24): Xaa is A or G or is absent

SEQ ID NO: 81895 - protein, 38 aa, Artificial Sequence; identical to SEQ ID NO: 18029
  GFR-binding peptide
  MOD_RES (2)..(4)..(38): Xaa is C or S

SEQ ID NO: 81896 - protein, 37 aa, Artificial Sequence; identical to SEQ ID NO: 18030
  GFR-binding peptide
  MOD_RES (2)..(2): Xaa is C or S

SEQ ID NO: 81897 - protein, 34 aa, Artificial Sequence; identical to SEQ ID NO: 50378
  GFR-binding peptide
  MOD_RES (2)..(33)..(34): Xaa is C or S

SEQ ID NO: 81898 - protein, 37 aa, Artificial Sequence; identical to SEQ ID NO: 50379
  GFR-binding peptide
  MOD_RES (1)..(32)..(33): Xaa is C or S

SEQ ID NO: 81899 - protein, 31 aa, Artificial Sequence; identical to SEQ ID NO: 46566
  GFR-binding peptide
  MOD_RES (1)..(1): Xaa is C or S

SEQ ID NO: 81900 - protein, 35 aa, Artificial Sequence; identical to SEQ ID NO: 49124
  GFR-binding peptide
  MOD_RES (2)..(4)..(35): Xaa is C or S

SEQ ID NO: 81901 - protein, 35 aa, Artificial Sequence; identical to SEQ ID NO: 18031
  GFR-binding peptide
  MOD_RES (1)..(1): Xaa is C or S
  MOD_RES (14)..(15)..(16)..(17)..(18): Xaa is A or G
  MOD_RES (19)..(20)..(21)..(22): Xaa is A or G or is absent

SEQ ID NO: 81902 - protein, 32 aa, Artificial Sequence; identical to SEQ ID NO: 46568
  GFR-binding peptide
  MOD_RES (11)..(12)..(13)..(14)..(15): Xaa is A or G
  MOD_RES (16)..(17)..(18)..(19): Xaa is A or G or is absent

SEQ ID NO: 81903 - protein, 41 aa, Artificial Sequence; identical to SEQ ID NO: 17204
  GFR-binding peptide
  MOD_RES (2)..(39): Xaa is C or S
  MOD_RES (15)..(16)..(17)..(18)..(19): Xaa is A or G
  MOD_RES (20)..(21)..(22)..(23): Xaa is A or G or is absent

SEQ ID NO: 81904 - protein, 36 aa, Artificial Sequence; identical to SEQ ID NO: 17205
  GFR-binding peptide
  MOD_RES (36)..(36): Xaa is C or S
  MOD_RES (12)..(13)..(14)..(15)..(16): Xaa is A or G
  MOD_RES (17)..(18)..(19)..(20): Xaa is A or G or is absent

SEQ ID NO: 81905 - protein, 43 aa, Artificial Sequence; identical to SEQ ID NO: 47846
  GFR-binding peptide
  MOD_RES (2)..(4)..(37)..(38): Xaa is C or S
  MOD_RES (15)..(16)..(17)..(18)..(19): Xaa is A or G
  MOD_RES (20)..(21)..(22)..(23): Xaa is A or G or is absent

SEQ ID NO: 81906 - protein, 39 aa, Artificial Sequence; identical to SEQ ID NO: 46576
  GFR-binding peptide
  MOD_RES (1)..(34)..(35): Xaa is C or S
  MOD_RES (12)..(13)..(14)..(15)..(16): Xaa is A or G
  MOD_RES (17)..(18)..(19)..(20): Xaa is A or G or is absent

SEQ ID NO: 81907 - protein, 34 aa, Artificial Sequence; identical to SEQ ID NO: 46577
  GFR-binding peptide
  MOD_RES (31)..(32): Xaa is C or S

SEQ ID NO: 81908 - protein, 33 aa, Artificial Sequence; identical to SEQ ID NO: 17208
  GFR-binding peptide
  MOD_RES (33)..(33): Xaa is C or S

SEQ ID NO: 81909 - protein, 37 aa, Artificial Sequence; identical to SEQ ID NO: 49131
  GFR-binding peptide
  MOD_RES (2)..(33)..(34): Xaa is C or S

SEQ ID NO: 81910 - protein, 37 aa, Artificial Sequence; identical to SEQ ID NO: 17209
  GFR-binding peptide
  MOD_RES (37)..(37): Xaa is C or S
  MOD_RES (13)..(14)..(15)..(16)..(17): Xaa is A or G
  MOD_RES (18)..(19)..(20)..(21): Xaa is A or G or is absent

SEQ ID NO: 81911 - protein, 42 aa, Artificial Sequence; identical to SEQ ID NO: 17211
  GFR-binding peptide
  MOD_RES (1)..(38): Xaa is C or S

SEQ ID NO: 81912 - protein, 32 aa, Artificial Sequence; identical to SEQ ID NO: 46585
  GFR-binding peptide
  MOD_RES (11)..(12)..(13)..(14)..(15): Xaa is A or G
  MOD_RES (16)..(17)..(18)..(19): Xaa is A or G or is absent

SEQ ID NO: 81913 - protein, 41 aa, Artificial Sequence; identical to SEQ ID NO: 17212
  GFR-binding peptide
  MOD_RES (2)..(36): Xaa is C or S

SEQ ID NO: 81914 - protein, 32 aa, Artificial Sequence; identical to SEQ ID NO: 47853
  GFR-binding peptide
  MOD_RES (11)..(12)..(13)..(14)..(15): Xaa is A or G
  MOD_RES (16)..(17)..(18)..(19): Xaa is A or G or is absent

SEQ ID NO: 81915 - protein, 38 aa, Artificial Sequence; identical to SEQ ID NO: 18035
  GFR-binding peptide
  MOD_RES (2)..(36): Xaa is C or S

SEQ ID NO: 81916 - protein, 42 aa, Artificial Sequence; identical to SEQ ID NO: 17215
  GFR-binding peptide
  MOD_RES (2)..(36): Xaa is C or S

SEQ ID NO: 81917 - protein, 43 aa, Artificial Sequence; identical to SEQ ID NO: 18037
  GFR-binding peptide
  MOD_RES (1)..(3)..(37): Xaa is C or S
  MOD_RES (15)..(16)..(17)..(18)..(19): Xaa is A or G
  MOD_RES (20)..(21)..(22)..(23): Xaa is A or G or is absent

SEQ ID NO: 81918 - protein, 37 aa, Artificial Sequence; identical to SEQ ID NO: 18038
  GFR-binding peptide
  MOD_RES (1)..(3): Xaa is C or S

SEQ ID NO: 81919 - protein, 34 aa, Artificial Sequence; identical to SEQ ID NO: 50399
  GFR-binding peptide
  MOD_RES (1)..(34): Xaa is C or S
  MOD_RES (12)..(13)..(14)..(15)..(16): Xaa is A or G
  MOD_RES (17)..(18)..(19)..(20): Xaa is A or G or is absent

SEQ ID NO: 81920 - protein, 39 aa, Artificial Sequence; identical to SEQ ID NO: 47860
  GFR-binding peptide
  MOD_RES (1)..(3)..(36)..(37): Xaa is C or S
  MOD_RES (14)..(15)..(16)..(17)..(18): Xaa is A or G
  MOD_RES (19)..(20)..(21)..(22): Xaa is A or G or is absent

SEQ ID NO: 81921 - protein, 39 aa, Artificial Sequence; identical to SEQ ID NO: 18041
  GFR-binding peptide
  MOD_RES (37)..(37): Xaa is C or S
  MOD_RES (13)..(14)..(15)..(16)..(17): Xaa is A or G
  MOD_RES (18)..(19)..(20)..(21): Xaa is A or G or is absent

SEQ ID NO: 81922 - protein, 39 aa, Artificial Sequence; identical to SEQ ID NO: 18043
  GFR-binding peptide
  MOD_RES (2)..(4)..(38): Xaa is C or S

SEQ ID NO: 81923 - protein, 43 aa, Artificial Sequence; identical to SEQ ID NO: 17219
  GFR-binding peptide
  MOD_RES (2)..(4)..(38): Xaa is C or S
  MOD_RES (16)..(17)..(18)..(19)..(20): Xaa is A or G
  MOD_RES (21)..(22)..(23)..(24): Xaa is A or G or is absent

SEQ ID NO: 81924 - protein, 36 aa, Artificial Sequence; identical to SEQ ID NO: 18045
  GFR-binding peptide
  MOD_RES (1)..(3): Xaa is C or S

SEQ ID NO: 81925 - protein, 44 aa, Artificial Sequence; identical to SEQ ID NO: 17220
  GFR-binding peptide
  MOD_RES (2)..(4)..(41): Xaa is C or S
  MOD_RES (17)..(18)..(19)..(20)..(21): Xaa is A or G
  MOD_RES (22)..(23)..(24)..(25): Xaa is A or G or is absent

SEQ ID NO: 81926 - protein, 36 aa, Artificial Sequence; identical to SEQ ID NO: 17221
  GFR-binding peptide
  MOD_RES (1)..(3): Xaa is C or S

SEQ ID NO: 81927 - protein, 38 aa, Artificial Sequence; identical to SEQ ID NO: 18048
  GFR-binding peptide
  MOD_RES (35)..(35): Xaa is C or S
  MOD_RES (11)..(12)..(13)..(14)..(15): Xaa is A or G
  MOD_RES (16)..(17)..(18)..(19): Xaa is A or G or is absent

SEQ ID NO: 81928 - protein, 43 aa, Artificial Sequence; identical to SEQ ID NO: 17225
  GFR-binding peptide
  MOD_RES (1)..(3)..(37): Xaa is C or S
  MOD_RES (15)..(16)..(17)..(18)..(19): Xaa is A or G
  MOD_RES (20)..(21)..(22)..(23): Xaa is A or G or is absent

SEQ ID NO: 81929 - protein, 38 aa, Artificial Sequence; identical to SEQ ID NO: 18049
  GFR-binding peptide
  MOD_RES (37)..(37): Xaa is C or S

SEQ ID NO: 81930 - protein, 39 aa, Artificial Sequence; identical to SEQ ID NO: 18051
  GFR-binding peptide
  MOD_RES (37)..(37): Xaa is C or S
  MOD_RES (13)..(14)..(15)..(16)..(17): Xaa is A or G
  MOD_RES (18)..(19)..(20)..(21): Xaa is A or G or is absent

SEQ ID NO: 81931 - protein, 34 aa, Artificial Sequence; identical to SEQ ID NO: 50411
  GFR-binding peptide
  MOD_RES (1)..(32)..(33): Xaa is C or S

SEQ ID NO: 81932 - protein, 37 aa, Artificial Sequence; identical to SEQ ID NO: 17228
  GFR-binding peptide
  MOD_RES (35)..(35): Xaa is C or S
  MOD_RES (11)..(12)..(13)..(14)..(15): Xaa is A or G
  MOD_RES (16)..(17)..(18)..(19): Xaa is A or G or is absent

SEQ ID NO: 81933 - protein, 39 aa, Artificial Sequence; identical to SEQ ID NO: 18052
  GFR-binding peptide
  MOD_RES (1)..(35): Xaa is C or S
  MOD_RES (13)..(14)..(15)..(16)..(17): Xaa is A or G
  MOD_RES (18)..(19)..(20)..(21): Xaa is A or G or is absent

SEQ ID NO: 81934 - protein, 35 aa, Artificial Sequence; identical to SEQ ID NO: 46609
  GFR-binding peptide
  MOD_RES (2)..(33)..(34): Xaa is C or S

SEQ ID NO: 81935 - protein, 37 aa, Artificial Sequence; identical to SEQ ID NO: 17230
  GFR-binding peptide
  MOD_RES (35)..(35): Xaa is C or S
  MOD_RES (11)..(12)..(13)..(14)..(15): Xaa is A or G
  MOD_RES (16)..(17)..(18)..(19): Xaa is A or G or is absent

SEQ ID NO: 81936 - protein, 44 aa, Artificial Sequence; identical to SEQ ID NO: 18053
  GFR-binding peptide
  MOD_RES (2)..(4)..(38): Xaa is C or S
  MOD_RES (16)..(17)..(18)..(19)..(20): Xaa is A or G
  MOD_RES (21)..(22)..(23)..(24): Xaa is A or G or is absent

SEQ ID NO: 81937 - protein, 42 aa, Artificial Sequence; identical to SEQ ID NO: 18054
  GFR-binding peptide
  MOD_RES (2)..(36): Xaa is C or S
  MOD_RES (14)..(15)..(16)..(17)..(18): Xaa is A or G
  MOD_RES (19)..(20)..(21)..(22): Xaa is A or G or is absent

SEQ ID NO: 81938 - protein, 39 aa, Artificial Sequence; identical to SEQ ID NO: 18055
  GFR-binding peptide
  MOD_RES (1)..(38): Xaa is C or S
  MOD_RES (14)..(15)..(16)..(17)..(18): Xaa is A or G
  MOD_RES (19)..(20)..(21)..(22): Xaa is A or G or is absent

SEQ ID NO: 81939 - protein, 32 aa, Artificial Sequence; identical to SEQ ID NO: 18056
  GFR-binding peptide

SEQ ID NO: 81940 - protein, 34 aa, Artificial Sequence; identical to SEQ ID NO: 50413
  GFR-binding peptide
  MOD_RES (2)..(2): Xaa is C or S
  MOD_RES (13)..(14)..(15)..(16)..(17): Xaa is A or G
  MOD_RES (18)..(19)..(20)..(21): Xaa is A or G or is absent

SEQ ID NO: 81941 - protein, 44 aa, Artificial Sequence; identical to SEQ ID NO: 18057
  GFR-binding peptide
  MOD_RES (2)..(4)..(41): Xaa is C or S

SEQ ID NO: 81942 - protein, 35 aa, Artificial Sequence; identical to SEQ ID NO: 46614
  GFR-binding peptide
  MOD_RES (2)..(33)..(34): Xaa is C or S

SEQ ID NO: 81943 - protein, 41 aa, Artificial Sequence; identical to SEQ ID NO: 17233
  GFR-binding peptide
  MOD_RES (2)..(39): Xaa is C or S

SEQ ID NO: 81944 - protein, 33 aa, Artificial Sequence; identical to SEQ ID NO: 18059
  GFR-binding peptide
  MOD_RES (12)..(13)..(14)..(15)..(16): Xaa is A or G
  MOD_RES (17)..(18)..(19)..(20): Xaa is A or G or is absent

SEQ ID NO: 81945 - protein, 34 aa, Artificial Sequence; identical to SEQ ID NO: 17234
  GFR-binding peptide
  MOD_RES (33)..(33): Xaa is C or S
  MOD_RES (11)..(12)..(13)..(14)..(15): Xaa is A or G
  MOD_RES (16)..(17)..(18)..(19): Xaa is A or G or is absent

SEQ ID NO: 81946 - protein, 30 aa, Artificial Sequence; identical to SEQ ID NO: 46616
  GFR-binding peptide

SEQ ID NO: 81947 - protein, 40 aa, Artificial Sequence; identical to SEQ ID NO: 17237
  GFR-binding peptide
  MOD_RES (36)..(36): Xaa is C or S

SEQ ID NO: 81948 - protein, 36 aa, Artificial Sequence; identical to SEQ ID NO: 18061
  GFR-binding peptide
  MOD_RES (13)..(14)..(15)..(16)..(17): Xaa is A or G
  MOD_RES (18)..(19)..(20)..(21): Xaa is A or G or is absent

SEQ ID NO: 81949 - protein, 39 aa, Artificial Sequence; identical to SEQ ID NO: 49167
  GFR-binding peptide
  MOD_RES (1)..(3)..(34)..(35): Xaa is C or S

SEQ ID NO: 81950 - protein, 40 aa, Artificial Sequence; identical to SEQ ID NO: 17238
  GFR-binding peptide
  MOD_RES (2)..(36): Xaa is C or S

SEQ ID NO: 81951 - protein, 37 aa, Artificial Sequence; identical to SEQ ID NO: 18066
  GFR-binding peptide
  MOD_RES (2)..(36): Xaa is C or S
  MOD_RES (14)..(15)..(16)..(17)..(18): Xaa is A or G
  MOD_RES (19)..(20)..(21)..(22): Xaa is A or G or is absent

SEQ ID NO: 81952 - protein, 39 aa, Artificial Sequence; identical to SEQ ID NO: 17241
  GFR-binding peptide
  MOD_RES (34)..(34): Xaa is C or S
  MOD_RES (12)..(13)..(14)..(15)..(16): Xaa is A or G
  MOD_RES (17)..(18)..(19)..(20): Xaa is A or G or is absent

SEQ ID NO: 81953 - protein, 39 aa, Artificial Sequence; identical to SEQ ID NO: 50423
  GFR-binding peptide
  MOD_RES (2)..(35)..(36): Xaa is C or S
  MOD_RES (13)..(14)..(15)..(16)..(17): Xaa is A or G
  MOD_RES (18)..(19)..(20)..(21): Xaa is A or G or is absent

SEQ ID NO: 81954 - protein, 36 aa, Artificial Sequence; identical to SEQ ID NO: 18067
  GFR-binding peptide
  MOD_RES (2)..(2): Xaa is C or S

SEQ ID NO: 81955 - protein, 37 aa, Artificial Sequence; identical to SEQ ID NO: 17242
  GFR-binding peptide
  MOD_RES (1)..(35): Xaa is C or S
  MOD_RES (13)..(14)..(15)..(16)..(17): Xaa is A or G
  MOD_RES (18)..(19)..(20)..(21): Xaa is A or G or is absent

SEQ ID NO: 81956 - protein, 42 aa, Artificial Sequence; identical to SEQ ID NO: 18068
  GFR-binding peptide
  MOD_RES (2)..(4)..(41): Xaa is C or S
  MOD_RES (17)..(18)..(19)..(20)..(21): Xaa is A or G
  MOD_RES (22)..(23)..(24)..(25): Xaa is A or G or is absent

SEQ ID NO: 81957 - protein, 36 aa, Artificial Sequence; identical to SEQ ID NO: 47885
  GFR-binding peptide
  MOD_RES (2)..(4): Xaa is C or S
  MOD_RES (15)..(16)..(17)..(18)..(19): Xaa is A or G
  MOD_RES (20)..(21)..(22)..(23): Xaa is A or G or is absent

SEQ ID NO: 81958 - protein, 34 aa, Artificial Sequence; identical to SEQ ID NO: 17244
  GFR-binding peptide
  MOD_RES (1)..(1): Xaa is C or S
  MOD_RES (13)..(14)..(15)..(16)..(17): Xaa is A or G
  MOD_RES (18)..(19)..(20)..(21): Xaa is A or G or is absent

SEQ ID NO: 81959 - protein, 38 aa, Artificial Sequence; identical to SEQ ID NO: 18069
  GFR-binding peptide
  MOD_RES (35)..(35): Xaa is C or S
  MOD_RES (11)..(12)..(13)..(14)..(15): Xaa is A or G
  MOD_RES (16)..(17)..(18)..(19): Xaa is A or G or is absent

SEQ ID NO: 81960 - protein, 39 aa, Artificial Sequence; identical to SEQ ID NO: 17245
  GFR-binding peptide
  MOD_RES (1)..(35): Xaa is C or S

SEQ ID NO: 81961 - protein, 37 aa, Artificial Sequence; identical to SEQ ID NO: 18070
  GFR-binding peptide
  MOD_RES (1)..(35): Xaa is C or S

SEQ ID NO: 81962 - protein, 35 aa, Artificial Sequence; identical to SEQ ID NO: 46634
  GFR-binding peptide
  MOD_RES (1)..(34)..(35): Xaa is C or S
  MOD_RES (12)..(13)..(14)..(15)..(16): Xaa is A or G
  MOD_RES (17)..(18)..(19)..(20): Xaa is A or G or is absent

SEQ ID NO: 81963 - protein, 39 aa, Artificial Sequence; identical to SEQ ID NO: 17246
  GFR-binding peptide
  MOD_RES (36)..(36): Xaa is C or S

SEQ ID NO: 81964 - protein, 37 aa, Artificial Sequence; identical to SEQ ID NO: 17248
  GFR-binding peptide
  MOD_RES (2)..(36): Xaa is C or S

SEQ ID NO: 81965 - protein, 36 aa, Artificial Sequence; identical to SEQ ID NO: 50441
  GFR-binding peptide
  MOD_RES (2)..(4)..(35)..(36): Xaa is C or S

SEQ ID NO: 81966 - protein, 40 aa, Artificial Sequence; identical to SEQ ID NO: 18071
  GFR-binding peptide
  MOD_RES (2)..(4)..(38): Xaa is C or S
  MOD_RES (16)..(17)..(18)..(19)..(20): Xaa is A or G
  MOD_RES (21)..(22)..(23)..(24): Xaa is A or G or is absent

SEQ ID NO: 81967 - protein, 39 aa, Artificial Sequence; identical to SEQ ID NO: 47892
  GFR-binding peptide
  MOD_RES (2)..(35)..(36): Xaa is C or S
  MOD_RES (13)..(14)..(15)..(16)..(17): Xaa is A or G
  MOD_RES (18)..(19)..(20)..(21): Xaa is A or G or is absent

SEQ ID NO: 81968 - protein, 37 aa, Artificial Sequence; identical to SEQ ID NO: 18072
  GFR-binding peptide
  MOD_RES (33)..(33): Xaa is C or S
  MOD_RES (11)..(12)..(13)..(14)..(15): Xaa is A or G
  MOD_RES (16)..(17)..(18)..(19): Xaa is A or G or is absent

SEQ ID NO: 81969 - protein, 38 aa, Artificial Sequence; identical to SEQ ID NO: 46639
  GFR-binding peptide
  MOD_RES (2)..(35)..(36): Xaa is C or S
  MOD_RES (13)..(14)..(15)..(16)..(17): Xaa is A or G
  MOD_RES (18)..(19)..(20)..(21): Xaa is A or G or is absent

SEQ ID NO: 81970 - protein, 40 aa, Artificial Sequence; identical to SEQ ID NO: 47894
  GFR-binding peptide
  MOD_RES (1)..(34)..(35): Xaa is C or S
  MOD_RES (12)..(13)..(14)..(15)..(16): Xaa is A or G
  MOD_RES (17)..(18)..(19)..(20): Xaa is A or G or is absent

SEQ ID NO: 81971 - protein, 32 aa, Artificial Sequence; identical to SEQ ID NO: 50444
  GFR-binding peptide
  MOD_RES (2)..(2): Xaa is C or S

SEQ ID NO: 81972 - protein, 37 aa, Artificial Sequence; identical to SEQ ID NO: 17251
  GFR-binding peptide
  MOD_RES (2)..(36): Xaa is C or S
  MOD_RES (14)..(15)..(16)..(17)..(18): Xaa is A or G
  MOD_RES (19)..(20)..(21)..(22): Xaa is A or G or is absent

SEQ ID NO: 81973 - protein, 35 aa, Artificial Sequence; identical to SEQ ID NO: 50450
  GFR-binding peptide
  MOD_RES (2)..(35): Xaa is C or S
  MOD_RES (13)..(14)..(15)..(16)..(17): Xaa is A or G
  MOD_RES (18)..(19)..(20)..(21): Xaa is A or G or is absent

SEQ ID NO: 81974 - protein, 41 aa, Artificial Sequence; identical to SEQ ID NO: 18074
  GFR-binding peptide
  MOD_RES (1)..(38): Xaa is C or S

SEQ ID NO: 81975 - protein, 39 aa, Artificial Sequence; identical to SEQ ID NO: 17255
  GFR-binding peptide
  MOD_RES (33)..(33): Xaa is C or S
  MOD_RES (11)..(12)..(13)..(14)..(15): Xaa is A or G
  MOD_RES (16)..(17)..(18)..(19): Xaa is A or G or is absent

SEQ ID NO: 81976 - protein, 36 aa, Artificial Sequence; identical to SEQ ID NO: 47900
  GFR-binding peptide
  MOD_RES (1)..(32)..(33): Xaa is C or S

SEQ ID NO: 81977 - protein, 40 aa, Artificial Sequence; identical to SEQ ID NO: 49195
  GFR-binding peptide
  MOD_RES (2)..(4)..(35)..(36): Xaa is C or S

SEQ ID NO: 81978 - protein, 43 aa, Artificial Sequence; identical to SEQ ID NO: 18075
  GFR-binding peptide
  MOD_RES (2)..(4)..(41): Xaa is C or S

SEQ ID NO: 81979 - protein, 39 aa, Artificial Sequence; identical to SEQ ID NO: 18076
  GFR-binding peptide
  MOD_RES (33)..(33): Xaa is C or S
  MOD_RES (11)..(12)..(13)..(14)..(15): Xaa is A or G
  MOD_RES (16)..(17)..(18)..(19): Xaa is A or G or is absent

SEQ ID NO: 81980 - protein, 36 aa, Artificial Sequence; identical to SEQ ID NO: 49197
  GFR-binding peptide
  MOD_RES (1)..(34)..(35): Xaa is C or S
  MOD_RES (12)..(13)..(14)..(15)..(16): Xaa is A or G
  MOD_RES (17)..(18)..(19)..(20): Xaa is A or G or is absent

SEQ ID NO: 81981 - protein, 40 aa, Artificial Sequence; identical to SEQ ID NO: 17256
  GFR-binding peptide
  MOD_RES (34)..(34): Xaa is C or S
  MOD_RES (12)..(13)..(14)..(15)..(16): Xaa is A or G
  MOD_RES (17)..(18)..(19)..(20): Xaa is A or G or is absent

SEQ ID NO: 81982 - protein, 35 aa, Artificial Sequence; identical to SEQ ID NO: 47909
  GFR-binding peptide
  MOD_RES (1)..(3): Xaa is C or S
  MOD_RES (14)..(15)..(16)..(17)..(18): Xaa is A or G
  MOD_RES (19)..(20)..(21)..(22): Xaa is A or G or is absent

SEQ ID NO: 81983 - protein, 40 aa, Artificial Sequence; identical to SEQ ID NO: 18077
  GFR-binding peptide
  MOD_RES (1)..(3)..(37): Xaa is C or S

SEQ ID NO: 81984 - protein, 39 aa, Artificial Sequence; identical to SEQ ID NO: 17259
  GFR-binding peptide
  MOD_RES (37)..(37): Xaa is C or S

SEQ ID NO: 81985 - protein, 37 aa, Artificial Sequence; identical to SEQ ID NO: 46652
  GFR-binding peptide
  MOD_RES (2)..(35)..(36): Xaa is C or S
  MOD_RES (13)..(14)..(15)..(16)..(17): Xaa is A or G
  MOD_RES (18)..(19)..(20)..(21): Xaa is A or G or is absent

SEQ ID NO: 81986 - protein, 39 aa, Artificial Sequence; identical to SEQ ID NO: 18078
  GFR-binding peptide
  MOD_RES (1)..(35): Xaa is C or S
  MOD_RES (13)..(14)..(15)..(16)..(17): Xaa is A or G
  MOD_RES (18)..(19)..(20)..(21): Xaa is A or G or is absent

SEQ ID NO: 81987 - protein, 40 aa, Artificial Sequence; identical to SEQ ID NO: 17260
  GFR-binding peptide
  MOD_RES (37)..(37): Xaa is C or S

SEQ ID NO: 81988 - protein, 34 aa, Artificial Sequence; identical to SEQ ID NO: 17261
  GFR-binding peptide
  MOD_RES (34)..(34): Xaa is C or S
  MOD_RES (12)..(13)..(14)..(15)..(16): Xaa is A or G
  MOD_RES (17)..(18)..(19)..(20): Xaa is A or G or is absent

SEQ ID NO: 81989 - protein, 35 aa, Artificial Sequence; identical to SEQ ID NO: 49205
  GFR-binding peptide
  MOD_RES (1)..(34)..(35): Xaa is C or S
  MOD_RES (12)..(13)..(14)..(15)..(16): Xaa is A or G
  MOD_RES (17)..(18)..(19)..(20): Xaa is A or G or is absent

SEQ ID NO: 81990 - protein, 33 aa, Artificial Sequence; identical to SEQ ID NO: 49206
  GFR-binding peptide
  MOD_RES (1)..(3): Xaa is C or S

SEQ ID NO: 81991 - protein, 35 aa, Artificial Sequence; identical to SEQ ID NO: 47915
  GFR-binding peptide
  MOD_RES (1)..(3): Xaa is C or S
  MOD_RES (14)..(15)..(16)..(17)..(18): Xaa is A or G
  MOD_RES (19)..(20)..(21)..(22): Xaa is A or G or is absent

SEQ ID NO: 81992 - protein, 35 aa, Artificial Sequence; identical to SEQ ID NO: 18081
  GFR-binding peptide
  MOD_RES (1)..(35): Xaa is C or S

SEQ ID NO: 81993 - protein, 38 aa, Artificial Sequence; identical to SEQ ID NO: 18082
  GFR-binding peptide
  MOD_RES (2)..(2): Xaa is C or S

SEQ ID NO: 81994 - protein, 34 aa, Artificial Sequence; identical to SEQ ID NO: 50466
  GFR-binding peptide
  MOD_RES (31)..(32): Xaa is C or S

SEQ ID NO: 81995 - protein, 39 aa, Artificial Sequence; identical to SEQ ID NO: 46660
  GFR-binding peptide
  MOD_RES (2)..(35)..(36): Xaa is C or S
  MOD_RES (13)..(14)..(15)..(16)..(17): Xaa is A or G
  MOD_RES (18)..(19)..(20)..(21): Xaa is A or G or is absent

SEQ ID NO: 81996 - protein, 34 aa, Artificial Sequence; identical to SEQ ID NO: 46661
  GFR-binding peptide
  MOD_RES (1)..(32)..(33): Xaa is C or S

SEQ ID NO: 81997 - protein, 36 aa, Artificial Sequence; identical to SEQ ID NO: 50468
  GFR-binding peptide
  MOD_RES (33)..(34): Xaa is C or S
  MOD_RES (11)..(12)..(13)..(14)..(15): Xaa is A or G
  MOD_RES (16)..(17)..(18)..(19): Xaa is A or G or is absent

SEQ ID NO: 81998 - protein, 32 aa, Artificial Sequence; identical to SEQ ID NO: 49211
  GFR-binding peptide
  MOD_RES (11)..(12)..(13)..(14)..(15): Xaa is A or G
  MOD_RES (16)..(17)..(18)..(19): Xaa is A or G or is absent

SEQ ID NO: 81999 - protein, 34 aa, Artificial Sequence; identical to SEQ ID NO: 17267
  GFR-binding peptide
  MOD_RES (13)..(14)..(15)..(16)..(17): Xaa is A or G
  MOD_RES (18)..(19)..(20)..(21): Xaa is A or G or is absent

SEQ ID NO: 82000 - protein, 35 aa, Artificial Sequence; identical to SEQ ID NO: 47924
  GFR-binding peptide
  MOD_RES (1)..(3): Xaa is C or S
  MOD_RES (14)..(15)..(16)..(17)..(18): Xaa is A or G
  MOD_RES (19)..(20)..(21)..(22): Xaa is A or G or is absent

SEQ ID NO: 82001 - protein, 39 aa, Artificial Sequence; identical to SEQ ID NO: 17268
  GFR-binding peptide
  MOD_RES (1)..(3)..(37): Xaa is C or S
  MOD_RES (15)..(16)..(17)..(18)..(19): Xaa is A or G
  MOD_RES (20)..(21)..(22)..(23): Xaa is A or G or is absent

SEQ ID NO: 82002 - protein, 39 aa, Artificial Sequence; identical to SEQ ID NO: 18087
  GFR-binding peptide
  MOD_RES (34)..(34): Xaa is C or S
  MOD_RES (12)..(13)..(14)..(15)..(16): Xaa is A or G
  MOD_RES (17)..(18)..(19)..(20): Xaa is A or G or is absent

SEQ ID NO: 82003 - protein, 32 aa, Artificial Sequence; identical to SEQ ID NO: 47927
  GFR-binding peptide
  MOD_RES (31)..(32): Xaa is C or S

SEQ ID NO: 82004 - protein, 34 aa, Artificial Sequence; identical to SEQ ID NO: 18089
  GFR-binding peptide
  MOD_RES (33)..(33): Xaa is C or S

SEQ ID NO: 82005 - protein, 35 aa, Artificial Sequence; identical to SEQ ID NO: 17272
  GFR-binding peptide
  MOD_RES (35)..(35): Xaa is C or S
  MOD_RES (11)..(12)..(13)..(14)..(15): Xaa is A or G
  MOD_RES (16)..(17)..(18)..(19): Xaa is A or G or is absent

SEQ ID NO: 82006 - protein, 37 aa, Artificial Sequence; identical to SEQ ID NO: 17275
  GFR-binding peptide
  MOD_RES (1)..(3)..(37): Xaa is C or S
  MOD_RES (15)..(16)..(17)..(18)..(19): Xaa is A or G
  MOD_RES (20)..(21)..(22)..(23): Xaa is A or G or is absent

SEQ ID NO: 82007 - protein, 42 aa, Artificial Sequence; identical to SEQ ID NO: 17276
  GFR-binding peptide
  MOD_RES (2)..(4)..(38): Xaa is C or S

SEQ ID NO: 82008 - protein, 35 aa, Artificial Sequence; identical to SEQ ID NO: 18091
  GFR-binding peptide
  MOD_RES (2)..(2): Xaa is C or S
  MOD_RES (14)..(15)..(16)..(17)..(18): Xaa is A or G
  MOD_RES (19)..(20)..(21)..(22): Xaa is A or G or is absent

SEQ ID NO: 82009 - protein, 36 aa, Artificial Sequence; identical to SEQ ID NO: 18092
  GFR-binding peptide

SEQ ID NO: 82010 - protein, 36 aa, Artificial Sequence; identical to SEQ ID NO: 18093
  GFR-binding peptide
  MOD_RES (1)..(1): Xaa is C or S

SEQ ID NO: 82011 - protein, 33 aa, Artificial Sequence; identical to SEQ ID NO: 50477
  GFR-binding peptide
  MOD_RES (1)..(1): Xaa is C or S
  MOD_RES (12)..(13)..(14)..(15)..(16): Xaa is A or G
  MOD_RES (17)..(18)..(19)..(20): Xaa is A or G or is absent

SEQ ID NO: 82012 - protein, 38 aa, Artificial Sequence; identical to SEQ ID NO: 18094
  GFR-binding peptide
  MOD_RES (1)..(35): Xaa is C or S
  MOD_RES (13)..(14)..(15)..(16)..(17): Xaa is A or G
  MOD_RES (18)..(19)..(20)..(21): Xaa is A or G or is absent

SEQ ID NO: 82013 - protein, 41 aa, Artificial Sequence; identical to SEQ ID NO: 17277
  GFR-binding peptide
  MOD_RES (1)..(3)..(40): Xaa is C or S
  MOD_RES (16)..(17)..(18)..(19)..(20): Xaa is A or G
  MOD_RES (21)..(22)..(23)..(24): Xaa is A or G or is absent

SEQ ID NO: 82014 - protein, 33 aa, Artificial Sequence; identical to SEQ ID NO: 18095
  GFR-binding peptide

SEQ ID NO: 82015 - protein, 33 aa, Artificial Sequence; identical to SEQ ID NO: 46677
  GFR-binding peptide
  MOD_RES (33)..(33): Xaa is C or S
  MOD_RES (11)..(12)..(13)..(14)..(15): Xaa is A or G
  MOD_RES (16)..(17)..(18)..(19): Xaa is A or G or is absent

SEQ ID NO: 82016 - protein, 35 aa, Artificial Sequence; identical to SEQ ID NO: 18097
  GFR-binding peptide
  MOD_RES (33)..(33): Xaa is C or S

SEQ ID NO: 82017 - protein, 41 aa, Artificial Sequence; identical to SEQ ID NO: 17284
  GFR-binding peptide
  MOD_RES (2)..(4)..(38): Xaa is C or S

SEQ ID NO: 82018 - protein, 33 aa, Artificial Sequence; identical to SEQ ID NO: 17285
  GFR-binding peptide
  MOD_RES (12)..(13)..(14)..(15)..(16): Xaa is A or G
  MOD_RES (17)..(18)..(19)..(20): Xaa is A or G or is absent

SEQ ID NO: 82019 - protein, 36 aa, Artificial Sequence; identical to SEQ ID NO: 18099
  GFR-binding peptide
  MOD_RES (35)..(35): Xaa is C or S

SEQ ID NO: 82020 - protein, 33 aa, Artificial Sequence; identical to SEQ ID NO: 46680
  GFR-binding peptide
  MOD_RES (33)..(33): Xaa is C or S
  MOD_RES (11)..(12)..(13)..(14)..(15): Xaa is A or G
  MOD_RES (16)..(17)..(18)..(19): Xaa is A or G or is absent

SEQ ID NO: 82021 - protein, 38 aa, Artificial Sequence; identical to SEQ ID NO: 50486
  GFR-binding peptide
  MOD_RES (1)..(3)..(34)..(35): Xaa is C or S

SEQ ID NO: 82022 - protein, 38 aa, Artificial Sequence; identical to SEQ ID NO: 17286
  GFR-binding peptide
  MOD_RES (33)..(33): Xaa is C or S

SEQ ID NO: 82023 - protein, 39 aa, Artificial Sequence; identical to SEQ ID NO: 50488
  GFR-binding peptide
  MOD_RES (2)..(35)..(36): Xaa is C or S
  MOD_RES (13)..(14)..(15)..(16)..(17): Xaa is A or G
  MOD_RES (18)..(19)..(20)..(21): Xaa is A or G or is absent

SEQ ID NO: 82024 - protein, 34 aa, Artificial Sequence; identical to SEQ ID NO: 50493
  GFR-binding peptide
  MOD_RES (2)..(33)..(34): Xaa is C or S

SEQ ID NO: 82025 - protein, 34 aa, Artificial Sequence; identical to SEQ ID NO: 18100
  GFR-binding peptide
  MOD_RES (34)..(34): Xaa is C or S

SEQ ID NO: 82026 - protein, 41 aa, Artificial Sequence; identical to SEQ ID NO: 17288
  GFR-binding peptide
  MOD_RES (1)..(3)..(40): Xaa is C or S
  MOD_RES (16)..(17)..(18)..(19)..(20): Xaa is A or G
  MOD_RES (21)..(22)..(23)..(24): Xaa is A or G or is absent

SEQ ID NO: 82027 - protein, 39 aa, Artificial Sequence; identical to SEQ ID NO: 17290
  GFR-binding peptide
  MOD_RES (2)..(39): Xaa is C or S

SEQ ID NO: 82028 - protein, 35 aa, Artificial Sequence; identical to SEQ ID NO: 18101
  GFR-binding peptide
  MOD_RES (1)..(1): Xaa is C or S
  MOD_RES (14)..(15)..(16)..(17)..(18): Xaa is A or G
  MOD_RES (19)..(20)..(21)..(22): Xaa is A or G or is absent

SEQ ID NO: 82029 - protein, 44 aa, Artificial Sequence; identical to SEQ ID NO: 18103
  GFR-binding peptide
  MOD_RES (2)..(4)..(41): Xaa is C or S

SEQ ID NO: 82030 - protein, 39 aa, Artificial Sequence; identical to SEQ ID NO: 17291
  GFR-binding peptide
  MOD_RES (34)..(34): Xaa is C or S
  MOD_RES (12)..(13)..(14)..(15)..(16): Xaa is A or G
  MOD_RES (17)..(18)..(19)..(20): Xaa is A or G or is absent

SEQ ID NO: 82031 - protein, 39 aa, Artificial Sequence; identical to SEQ ID NO: 50495
  GFR-binding peptide
  MOD_RES (1)..(34)..(35): Xaa is C or S
  MOD_RES (12)..(13)..(14)..(15)..(16): Xaa is A or G
  MOD_RES (17)..(18)..(19)..(20): Xaa is A or G or is absent

SEQ ID NO: 82032 - protein, 37 aa, Artificial Sequence; identical to SEQ ID NO: 18104
  GFR-binding peptide
  MOD_RES (33)..(33): Xaa is C or S
  MOD_RES (11)..(12)..(13)..(14)..(15): Xaa is A or G
  MOD_RES (16)..(17)..(18)..(19): Xaa is A or G or is absent

SEQ ID NO: 82033 - protein, 39 aa, Artificial Sequence; identical to SEQ ID NO: 50498
  GFR-binding peptide
  MOD_RES (1)..(34)..(35): Xaa is C or S
  MOD_RES (12)..(13)..(14)..(15)..(16): Xaa is A or G
  MOD_RES (17)..(18)..(19)..(20): Xaa is A or G or is absent

SEQ ID NO: 82034 - protein, 39 aa, Artificial Sequence; identical to SEQ ID NO: 17292
  GFR-binding peptide
  MOD_RES (36)..(36): Xaa is C or S

SEQ ID NO: 82035 - protein, 38 aa, Artificial Sequence; identical to SEQ ID NO: 17293
  GFR-binding peptide
  MOD_RES (1)..(3): Xaa is C or S
  MOD_RES (16)..(17)..(18)..(19)..(20): Xaa is A or G
  MOD_RES (21)..(22)..(23)..(24): Xaa is A or G or is absent

SEQ ID NO: 82036 - protein, 32 aa, Artificial Sequence; identical to SEQ ID NO: 50499
  GFR-binding peptide
  MOD_RES (2)..(2): Xaa is C or S

SEQ ID NO: 82037 - protein, 41 aa, Artificial Sequence; identical to SEQ ID NO: 49243
  GFR-binding peptide
  MOD_RES (2)..(4)..(35)..(36): Xaa is C or S

SEQ ID NO: 82038 - protein, 40 aa, Artificial Sequence; identical to SEQ ID NO: 17295
  GFR-binding peptide
  MOD_RES (2)..(36): Xaa is C or S
  MOD_RES (14)..(15)..(16)..(17)..(18): Xaa is A or G
  MOD_RES (19)..(20)..(21)..(22): Xaa is A or G or is absent

SEQ ID NO: 82039 - protein, 31 aa, Artificial Sequence; identical to SEQ ID NO: 47956
  GFR-binding peptide
  MOD_RES (1)..(1): Xaa is C or S

SEQ ID NO: 82040 - protein, 36 aa, Artificial Sequence; identical to SEQ ID NO: 18106
  GFR-binding peptide
  MOD_RES (1)..(35): Xaa is C or S
  MOD_RES (13)..(14)..(15)..(16)..(17): Xaa is A or G
  MOD_RES (18)..(19)..(20)..(21): Xaa is A or G or is absent

SEQ ID NO: 82041 - protein, 42 aa, Artificial Sequence; identical to SEQ ID NO: 17296
  GFR-binding peptide
  MOD_RES (2)..(4)..(38): Xaa is C or S

SEQ ID NO: 82042 - protein, 41 aa, Artificial Sequence; identical to SEQ ID NO: 17297
  GFR-binding peptide
  MOD_RES (1)..(3)..(37): Xaa is C or S
  MOD_RES (15)..(16)..(17)..(18)..(19): Xaa is A or G
  MOD_RES (20)..(21)..(22)..(23): Xaa is A or G or is absent

SEQ ID NO: 82043 - protein, 40 aa, Artificial Sequence; identical to SEQ ID NO: 18108
  GFR-binding peptide
  MOD_RES (37)..(37): Xaa is C or S

SEQ ID NO: 82044 - protein, 38 aa, Artificial Sequence; identical to SEQ ID NO: 18110
  GFR-binding peptide
  MOD_RES (36)..(36): Xaa is C or S
  MOD_RES (12)..(13)..(14)..(15)..(16): Xaa is A or G
  MOD_RES (17)..(18)..(19)..(20): Xaa is A or G or is absent

SEQ ID NO: 82045 - protein, 40 aa, Artificial Sequence; identical to SEQ ID NO: 46697
  GFR-binding peptide
  MOD_RES (2)..(4)..(37)..(38): Xaa is C or S
  MOD_RES (15)..(16)..(17)..(18)..(19): Xaa is A or G
  MOD_RES (20)..(21)..(22)..(23): Xaa is A or G or is absent

SEQ ID NO: 82046 - protein, 43 aa, Artificial Sequence; identical to SEQ ID NO: 17299
  GFR-binding peptide
  MOD_RES (1)..(3)..(37): Xaa is C or S

SEQ ID NO: 82047 - protein, 32 aa, Artificial Sequence; identical to SEQ ID NO: 47963
  GFR-binding peptide
  MOD_RES (1)..(32): Xaa is C or S

SEQ ID NO: 82048 - protein, 40 aa, Artificial Sequence; identical to SEQ ID NO: 17301
  GFR-binding peptide
  MOD_RES (36)..(36): Xaa is C or S

SEQ ID NO: 82049 - protein, 36 aa, Artificial Sequence; identical to SEQ ID NO: 18112
  GFR-binding peptide
  MOD_RES (1)..(3): Xaa is C or S
  MOD_RES (15)..(16)..(17)..(18)..(19): Xaa is A or G
  MOD_RES (20)..(21)..(22)..(23): Xaa is A or G or is absent

SEQ ID NO: 82050 - protein, 34 aa, Artificial Sequence; identical to SEQ ID NO: 17302
  GFR-binding peptide

SEQ ID NO: 82051 - protein, 41 aa, Artificial Sequence; identical to SEQ ID NO: 18113
  GFR-binding peptide
  MOD_RES (2)..(39): Xaa is C or S

SEQ ID NO: 82052 - protein, 33 aa, Artificial Sequence; identical to SEQ ID NO: 46704
  GFR-binding peptide
  MOD_RES (1)..(32)..(33): Xaa is C or S

SEQ ID NO: 82053 - protein, 39 aa, Artificial Sequence; identical to SEQ ID NO: 18114
  GFR-binding peptide
  MOD_RES (1)..(38): Xaa is C or S

SEQ ID NO: 82054 - protein, 44 aa, Artificial Sequence; identical to SEQ ID NO: 18117
  GFR-binding peptide
  MOD_RES (1)..(3)..(40): Xaa is C or S
  MOD_RES (16)..(17)..(18)..(19)..(20): Xaa is A or G
  MOD_RES (21)..(22)..(23)..(24): Xaa is A or G or is absent

SEQ ID NO: 82055 - protein, 39 aa, Artificial Sequence; identical to SEQ ID NO: 18118
  GFR-binding peptide
  MOD_RES (2)..(36): Xaa is C or S
  MOD_RES (14)..(15)..(16)..(17)..(18): Xaa is A or G
  MOD_RES (19)..(20)..(21)..(22): Xaa is A or G or is absent

SEQ ID NO: 82056 - protein, 38 aa, Artificial Sequence; identical to SEQ ID NO: 18119
  GFR-binding peptide
  MOD_RES (33)..(33): Xaa is C or S

SEQ ID NO: 82057 - protein, 33 aa, Artificial Sequence; identical to SEQ ID NO: 17308
  GFR-binding peptide
  MOD_RES (12)..(13)..(14)..(15)..(16): Xaa is A or G
  MOD_RES (17)..(18)..(19)..(20): Xaa is A or G or is absent

SEQ ID NO: 82058 - protein, 39 aa, Artificial Sequence; identical to SEQ ID NO: 18120
  GFR-binding peptide
  MOD_RES (33)..(33): Xaa is C or S

SEQ ID NO: 82059 - protein, 33 aa, Artificial Sequence; identical to SEQ ID NO: 17310
  GFR-binding peptide
  MOD_RES (12)..(13)..(14)..(15)..(16): Xaa is A or G
  MOD_RES (17)..(18)..(19)..(20): Xaa is A or G or is absent

SEQ ID NO: 82060 - protein, 43 aa, Artificial Sequence; identical to SEQ ID NO: 18121
  GFR-binding peptide
  MOD_RES (2)..(4)..(41): Xaa is C or S

SEQ ID NO: 82061 - protein, 34 aa, Artificial Sequence; identical to SEQ ID NO: 18123
  GFR-binding peptide
  MOD_RES (33)..(33): Xaa is C or S

SEQ ID NO: 82062 - protein, 39 aa, Artificial Sequence; identical to SEQ ID NO: 47985
  GFR-binding peptide
  MOD_RES (1)..(34)..(35): Xaa is C or S
  MOD_RES (12)..(13)..(14)..(15)..(16): Xaa is A or G
  MOD_RES (17)..(18)..(19)..(20): Xaa is A or G or is absent

SEQ ID NO: 82063 - protein, 45 aa, Artificial Sequence; identical to SEQ ID NO: 18125
  GFR-binding peptide
  MOD_RES (2)..(4)..(41): Xaa is C or S

SEQ ID NO: 82064 - protein, 38 aa, Artificial Sequence; identical to SEQ ID NO: 50532
  GFR-binding peptide
  MOD_RES (1)..(3)..(34)..(35): Xaa is C or S

SEQ ID NO: 82065 - protein, 35 aa, Artificial Sequence; identical to SEQ ID NO: 17317
  GFR-binding peptide
  MOD_RES (34)..(34): Xaa is C or S

SEQ ID NO: 82066 - protein, 35 aa, Artificial Sequence; identical to SEQ ID NO: 18126
  GFR-binding peptide
  MOD_RES (33)..(33): Xaa is C or S
  MOD_RES (11)..(12)..(13)..(14)..(15): Xaa is A or G
  MOD_RES (16)..(17)..(18)..(19): Xaa is A or G or is absent

SEQ ID NO: 82067 - protein, 38 aa, Artificial Sequence; identical to SEQ ID NO: 49271
  GFR-binding peptide
  MOD_RES (1)..(34)..(35): Xaa is C or S
  MOD_RES (12)..(13)..(14)..(15)..(16): Xaa is A or G
  MOD_RES (17)..(18)..(19)..(20): Xaa is A or G or is absent

SEQ ID NO: 82068 - protein, 37 aa, Artificial Sequence; identical to SEQ ID NO: 49276
  GFR-binding peptide
  MOD_RES (31)..(32): Xaa is C or S

SEQ ID NO: 82069 - protein, 36 aa, Artificial Sequence; identical to SEQ ID NO: 18129
  GFR-binding peptide
  MOD_RES (1)..(1): Xaa is C or S
  MOD_RES (14)..(15)..(16)..(17)..(18): Xaa is A or G
  MOD_RES (19)..(20)..(21)..(22): Xaa is A or G or is absent

SEQ ID NO: 82070 - protein, 36 aa, Artificial Sequence; identical to SEQ ID NO: 50540
  GFR-binding peptide
  MOD_RES (1)..(3)..(36): Xaa is C or S
  MOD_RES (14)..(15)..(16)..(17)..(18): Xaa is A or G
  MOD_RES (19)..(20)..(21)..(22): Xaa is A or G or is absent

SEQ ID NO: 82071 - protein, 36 aa, Artificial Sequence; identical to SEQ ID NO: 17321
  GFR-binding peptide
  MOD_RES (1)..(35): Xaa is C or S

SEQ ID NO: 82072 - protein, 42 aa, Artificial Sequence; identical to SEQ ID NO: 17323
  GFR-binding peptide
  MOD_RES (1)..(3)..(37): Xaa is C or S

SEQ ID NO: 82073 - protein, 37 aa, Artificial Sequence; identical to SEQ ID NO: 50542
  GFR-binding peptide
  MOD_RES (2)..(33)..(34): Xaa is C or S

SEQ ID NO: 82074 - protein, 38 aa, Artificial Sequence; identical to SEQ ID NO: 17324
  GFR-binding peptide
  MOD_RES (2)..(36): Xaa is C or S

SEQ ID NO: 82075 - protein, 37 aa, Artificial Sequence; identical to SEQ ID NO: 17326
  GFR-binding peptide
  MOD_RES (33)..(33): Xaa is C or S

SEQ ID NO: 82076 - protein, 37 aa, Artificial Sequence; identical to SEQ ID NO: 49280
  GFR-binding peptide
  MOD_RES (2)..(4)..(37): Xaa is C or S
  MOD_RES (15)..(16)..(17)..(18)..(19): Xaa is A or G
  MOD_RES (20)..(21)..(22)..(23): Xaa is A or G or is absent

SEQ ID NO: 82077 - protein, 40 aa, Artificial Sequence; identical to SEQ ID NO: 18131
  GFR-binding peptide
  MOD_RES (2)..(39): Xaa is C or S

SEQ ID NO: 82078 - protein, 36 aa, Artificial Sequence; identical to SEQ ID NO: 18132
  GFR-binding peptide
  MOD_RES (2)..(36): Xaa is C or S
  MOD_RES (14)..(15)..(16)..(17)..(18): Xaa is A or G
  MOD_RES (19)..(20)..(21)..(22): Xaa is A or G or is absent

SEQ ID NO: 82079 - protein, 35 aa, Artificial Sequence; identical to SEQ ID NO: 17327
  GFR-binding peptide
  MOD_RES (1)..(35): Xaa is C or S
  MOD_RES (13)..(14)..(15)..(16)..(17): Xaa is A or G
  MOD_RES (18)..(19)..(20)..(21): Xaa is A or G or is absent

SEQ ID NO: 82080 - protein, 38 aa, Artificial Sequence; identical to SEQ ID NO: 49281
  GFR-binding peptide
  MOD_RES (2)..(4)..(35)..(36): Xaa is C or S

SEQ ID NO: 82081 - protein, 37 aa, Artificial Sequence; identical to SEQ ID NO: 49282
  GFR-binding peptide
  MOD_RES (31)..(32): Xaa is C or S

SEQ ID NO: 82082 - protein, 37 aa, Artificial Sequence; identical to SEQ ID NO: 18134
  GFR-binding peptide
  MOD_RES (33)..(33): Xaa is C or S

SEQ ID NO: 82083 - protein, 35 aa, Artificial Sequence; identical to SEQ ID NO: 50548
  GFR-binding peptide
  MOD_RES (31)..(32): Xaa is C or S

SEQ ID NO: 82084 - protein, 41 aa, Artificial Sequence; identical to SEQ ID NO: 18136
  GFR-binding peptide
  MOD_RES (2)..(36): Xaa is C or S

SEQ ID NO: 82085 - protein, 35 aa, Artificial Sequence; identical to SEQ ID NO: 17330
  GFR-binding peptide
  MOD_RES (33)..(33): Xaa is C or S

SEQ ID NO: 82086 - protein, 35 aa, Artificial Sequence; identical to SEQ ID NO: 17332
  GFR-binding peptide
  MOD_RES (1)..(1): Xaa is C or S

SEQ ID NO: 82087 - protein, 40 aa, Artificial Sequence; identical to SEQ ID NO: 48002
  GFR-binding peptide
  MOD_RES (2)..(4)..(35)..(36): Xaa is C or S

SEQ ID NO: 82088 - protein, 43 aa, Artificial Sequence; identical to SEQ ID NO: 18140
  GFR-binding peptide
  MOD_RES (2)..(4)..(38): Xaa is C or S
  MOD_RES (16)..(17)..(18)..(19)..(20): Xaa is A or G
  MOD_RES (21)..(22)..(23)..(24): Xaa is A or G or is absent

SEQ ID NO: 82089 - protein, 36 aa, Artificial Sequence; identical to SEQ ID NO: 18142
  GFR-binding peptide
  MOD_RES (36)..(36): Xaa is C or S
  MOD_RES (12)..(13)..(14)..(15)..(16): Xaa is A or G
  MOD_RES (17)..(18)..(19)..(20): Xaa is A or G or is absent

SEQ ID NO: 82090 - protein, 42 aa, Artificial Sequence; identical to SEQ ID NO: 17334
  GFR-binding peptide
  MOD_RES (1)..(3)..(37): Xaa is C or S
  MOD_RES (15)..(16)..(17)..(18)..(19): Xaa is A or G
  MOD_RES (20)..(21)..(22)..(23): Xaa is A or G or is absent

SEQ ID NO: 82091 - protein, 35 aa, Artificial Sequence; identical to SEQ ID NO: 48007
  GFR-binding peptide
  MOD_RES (2)..(4)..(35): Xaa is C or S

SEQ ID NO: 82092 - protein, 38 aa, Artificial Sequence; identical to SEQ ID NO: 46748
  GFR-binding peptide
  MOD_RES (1)..(3)..(36)..(37): Xaa is C or S
  MOD_RES (14)..(15)..(16)..(17)..(18): Xaa is A or G
  MOD_RES (19)..(20)..(21)..(22): Xaa is A or G or is absent

SEQ ID NO: 82093 - protein, 33 aa, Artificial Sequence; identical to SEQ ID NO: 17337
  GFR-binding peptide
  MOD_RES (11)..(12)..(13)..(14)..(15): Xaa is A or G
  MOD_RES (16)..(17)..(18)..(19): Xaa is A or G or is absent

SEQ ID NO: 82094 - protein, 38 aa, Artificial Sequence; identical to SEQ ID NO: 18144
  GFR-binding peptide
  MOD_RES (34)..(34): Xaa is C or S
  MOD_RES (12)..(13)..(14)..(15)..(16): Xaa is A or G
  MOD_RES (17)..(18)..(19)..(20): Xaa is A or G or is absent

SEQ ID NO: 82095 - protein, 34 aa, Artificial Sequence; identical to SEQ ID NO: 48018
  GFR-binding peptide
  MOD_RES (2)..(4): Xaa is C or S

SEQ ID NO: 82096 - protein, 40 aa, Artificial Sequence; identical to SEQ ID NO: 18149
  GFR-binding peptide
  MOD_RES (36)..(36): Xaa is C or S
  MOD_RES (12)..(13)..(14)..(15)..(16): Xaa is A or G
  MOD_RES (17)..(18)..(19)..(20): Xaa is A or G or is absent

SEQ ID NO: 82097 - protein, 39 aa, Artificial Sequence; identical to SEQ ID NO: 18152
  GFR-binding peptide
  MOD_RES (1)..(3)..(37): Xaa is C or S
  MOD_RES (15)..(16)..(17)..(18)..(19): Xaa is A or G
  MOD_RES (20)..(21)..(22)..(23): Xaa is A or G or is absent

SEQ ID NO: 82098 - protein, 43 aa, Artificial Sequence; identical to SEQ ID NO: 18153
  GFR-binding peptide
  MOD_RES (2)..(4)..(38): Xaa is C or S
  MOD_RES (16)..(17)..(18)..(19)..(20): Xaa is A or G
  MOD_RES (21)..(22)..(23)..(24): Xaa is A or G or is absent

SEQ ID NO: 82099 - protein, 40 aa, Artificial Sequence; identical to SEQ ID NO: 17340
  GFR-binding peptide
  MOD_RES (2)..(4): Xaa is C or S

SEQ ID NO: 82100 - protein, 37 aa, Artificial Sequence; identical to SEQ ID NO: 50570
  GFR-binding peptide
  MOD_RES (1)..(3)..(34)..(35): Xaa is C or S

SEQ ID NO: 82101 - protein, 44 aa, Artificial Sequence; identical to SEQ ID NO: 18155
  GFR-binding peptide
  MOD_RES (1)..(3)..(40): Xaa is C or S
  MOD_RES (16)..(17)..(18)..(19)..(20): Xaa is A or G
  MOD_RES (21)..(22)..(23)..(24): Xaa is A or G or is absent

SEQ ID NO: 82102 - protein, 38 aa, Artificial Sequence; identical to SEQ ID NO: 17343
  GFR-binding peptide
  MOD_RES (34)..(34): Xaa is C or S
  MOD_RES (12)..(13)..(14)..(15)..(16): Xaa is A or G
  MOD_RES (17)..(18)..(19)..(20): Xaa is A or G or is absent

SEQ ID NO: 82103 - protein, 35 aa, Artificial Sequence; identical to SEQ ID NO: 17345
  GFR-binding peptide
  MOD_RES (2)..(2): Xaa is C or S

SEQ ID NO: 82104 - protein, 34 aa, Artificial Sequence; identical to SEQ ID NO: 46763
  GFR-binding peptide
  MOD_RES (31)..(32): Xaa is C or S

SEQ ID NO: 82105 - protein, 38 aa, Artificial Sequence; identical to SEQ ID NO: 18156
  GFR-binding peptide
  MOD_RES (33)..(33): Xaa is C or S
  MOD_RES (11)..(12)..(13)..(14)..(15): Xaa is A or G
  MOD_RES (16)..(17)..(18)..(19): Xaa is A or G or is absent

SEQ ID NO: 82106 - protein, 42 aa, Artificial Sequence; identical to SEQ ID NO: 17348
  GFR-binding peptide
  MOD_RES (2)..(39): Xaa is C or S
  MOD_RES (15)..(16)..(17)..(18)..(19): Xaa is A or G
  MOD_RES (20)..(21)..(22)..(23): Xaa is A or G or is absent

SEQ ID NO: 82107 - protein, 36 aa, Artificial Sequence; identical to SEQ ID NO: 18157
  GFR-binding peptide
  MOD_RES (1)..(35): Xaa is C or S
  MOD_RES (13)..(14)..(15)..(16)..(17): Xaa is A or G
  MOD_RES (18)..(19)..(20)..(21): Xaa is A or G or is absent

SEQ ID NO: 82108 - protein, 38 aa, Artificial Sequence; identical to SEQ ID NO: 49318
  GFR-binding peptide
  MOD_RES (33)..(34): Xaa is C or S
  MOD_RES (11)..(12)..(13)..(14)..(15): Xaa is A or G
  MOD_RES (16)..(17)..(18)..(19): Xaa is A or G or is absent

SEQ ID NO: 82109 - protein, 39 aa, Artificial Sequence; identical to SEQ ID NO: 46766
  GFR-binding peptide
  MOD_RES (33)..(34): Xaa is C or S
  MOD_RES (11)..(12)..(13)..(14)..(15): Xaa is A or G
  MOD_RES (16)..(17)..(18)..(19): Xaa is A or G or is absent

SEQ ID NO: 82110 - protein, 42 aa, Artificial Sequence; identical to SEQ ID NO: 17351
  GFR-binding peptide
  MOD_RES (2)..(39): Xaa is C or S

SEQ ID NO: 82111 - protein, 37 aa, Artificial Sequence; identical to SEQ ID NO: 49324
  GFR-binding peptide
  MOD_RES (1)..(34)..(35): Xaa is C or S
  MOD_RES (12)..(13)..(14)..(15)..(16): Xaa is A or G
  MOD_RES (17)..(18)..(19)..(20): Xaa is A or G or is absent

SEQ ID NO: 82112 - protein, 40 aa, Artificial Sequence; identical to SEQ ID NO: 18161
  GFR-binding peptide
  MOD_RES (34)..(34): Xaa is C or S
  MOD_RES (12)..(13)..(14)..(15)..(16): Xaa is A or G
  MOD_RES (17)..(18)..(19)..(20): Xaa is A or G or is absent

SEQ ID NO: 82113 - protein, 34 aa, Artificial Sequence; identical to SEQ ID NO: 50579
  GFR-binding peptide
  MOD_RES (2)..(2): Xaa is C or S
  MOD_RES (13)..(14)..(15)..(16)..(17): Xaa is A or G
  MOD_RES (18)..(19)..(20)..(21): Xaa is A or G or is absent

SEQ ID NO: 82114 - protein, 37 aa, Artificial Sequence; identical to SEQ ID NO: 18162
  GFR-binding peptide
  MOD_RES (36)..(36): Xaa is C or S

SEQ ID NO: 82115 - protein, 39 aa, Artificial Sequence; identical to SEQ ID NO: 48041
  GFR-binding peptide
  MOD_RES (2)..(33)..(34): Xaa is C or S

SEQ ID NO: 82116 - protein, 38 aa, Artificial Sequence; identical to SEQ ID NO: 50584
  GFR-binding peptide
  MOD_RES (1)..(3)..(34)..(35): Xaa is C or S

SEQ ID NO: 82117 - protein, 36 aa, Artificial Sequence; identical to SEQ ID NO: 49331
  GFR-binding peptide
  MOD_RES (31)..(32): Xaa is C or S

SEQ ID NO: 82118 - protein, 37 aa, Artificial Sequence; identical to SEQ ID NO: 48046
  GFR-binding peptide
  MOD_RES (31)..(32): Xaa is C or S

SEQ ID NO: 82119 - protein, 36 aa, Artificial Sequence; identical to SEQ ID NO: 49335
  GFR-binding peptide
  MOD_RES (2)..(4)..(35)..(36): Xaa is C or S

SEQ ID NO: 82120 - protein, 39 aa, Artificial Sequence; identical to SEQ ID NO: 17357
  GFR-binding peptide
  MOD_RES (1)..(3): Xaa is C or S

SEQ ID NO: 82121 - protein, 36 aa, Artificial Sequence; identical to SEQ ID NO: 46779
  GFR-binding peptide
  MOD_RES (1)..(32)..(33): Xaa is C or S

SEQ ID NO: 82122 - protein, 38 aa, Artificial Sequence; identical to SEQ ID NO: 49338
  GFR-binding peptide
  MOD_RES (1)..(3)..(36)..(37): Xaa is C or S
  MOD_RES (14)..(15)..(16)..(17)..(18): Xaa is A or G
  MOD_RES (19)..(20)..(21)..(22): Xaa is A or G or is absent

SEQ ID NO: 82123 - protein, 39 aa, Artificial Sequence; identical to SEQ ID NO: 49339
  GFR-binding peptide
  MOD_RES (1)..(3)..(34)..(35): Xaa is C or S

SEQ ID NO: 82124 - protein, 37 aa, Artificial Sequence; identical to SEQ ID NO: 50599
  GFR-binding peptide
  MOD_RES (2)..(4)..(35)..(36): Xaa is C or S

SEQ ID NO: 82125 - protein, 33 aa, Artificial Sequence; identical to SEQ ID NO: 49341
  GFR-binding peptide
  MOD_RES (2)..(33): Xaa is C or S

SEQ ID NO: 82126 - protein, 43 aa, Artificial Sequence; identical to SEQ ID NO: 18166
  GFR-binding peptide
  MOD_RES (1)..(3)..(40): Xaa is C or S

SEQ ID NO: 82127 - protein, 35 aa, Artificial Sequence; identical to SEQ ID NO: 50600
  GFR-binding peptide
  MOD_RES (2)..(35): Xaa is C or S
  MOD_RES (13)..(14)..(15)..(16)..(17): Xaa is A or G
  MOD_RES (18)..(19)..(20)..(21): Xaa is A or G or is absent

SEQ ID NO: 82128 - protein, 34 aa, Artificial Sequence; identical to SEQ ID NO: 49349
  GFR-binding peptide
  MOD_RES (1)..(32)..(33): Xaa is C or S

SEQ ID NO: 82129 - protein, 37 aa, Artificial Sequence; identical to SEQ ID NO: 18168
  GFR-binding peptide
  MOD_RES (1)..(1): Xaa is C or S
  MOD_RES (14)..(15)..(16)..(17)..(18): Xaa is A or G
  MOD_RES (19)..(20)..(21)..(22): Xaa is A or G or is absent

SEQ ID NO: 82130 - protein, 37 aa, Artificial Sequence; identical to SEQ ID NO: 48061
  GFR-binding peptide
  MOD_RES (1)..(3)..(36)..(37): Xaa is C or S
  MOD_RES (14)..(15)..(16)..(17)..(18): Xaa is A or G
  MOD_RES (19)..(20)..(21)..(22): Xaa is A or G or is absent

SEQ ID NO: 82131 - protein, 36 aa, Artificial Sequence; identical to SEQ ID NO: 18169
  GFR-binding peptide
  MOD_RES (1)..(35): Xaa is C or S
  MOD_RES (13)..(14)..(15)..(16)..(17): Xaa is A or G
  MOD_RES (18)..(19)..(20)..(21): Xaa is A or G or is absent

SEQ ID NO: 82132 - protein, 39 aa, Artificial Sequence; identical to SEQ ID NO: 17364
  GFR-binding peptide
  MOD_RES (1)..(3)..(37): Xaa is C or S

SEQ ID NO: 82133 - protein, 30 aa, Artificial Sequence; identical to SEQ ID NO: 48064
  GFR-binding peptide

SEQ ID NO: 82134 - protein, 41 aa, Artificial Sequence; identical to SEQ ID NO: 17365
  GFR-binding peptide
  MOD_RES (37)..(37): Xaa is C or S
  MOD_RES (13)..(14)..(15)..(16)..(17): Xaa is A or G
  MOD_RES (18)..(19)..(20)..(21): Xaa is A or G or is absent

SEQ ID NO: 82135 - protein, 39 aa, Artificial Sequence; identical to SEQ ID NO: 18179
  GFR-binding peptide
  MOD_RES (1)..(38): Xaa is C or S
  MOD_RES (14)..(15)..(16)..(17)..(18): Xaa is A or G
  MOD_RES (19)..(20)..(21)..(22): Xaa is A or G or is absent

SEQ ID NO: 82136 - protein, 40 aa, Artificial Sequence; identical to SEQ ID NO: 18182
  GFR-binding peptide
  MOD_RES (37)..(37): Xaa is C or S

SEQ ID NO: 82137 - protein, 34 aa, Artificial Sequence; identical to SEQ ID NO: 17367
  GFR-binding peptide
  MOD_RES (34)..(34): Xaa is C or S
  MOD_RES (12)..(13)..(14)..(15)..(16): Xaa is A or G
  MOD_RES (17)..(18)..(19)..(20): Xaa is A or G or is absent

SEQ ID NO: 82138 - protein, 37 aa, Artificial Sequence; identical to SEQ ID NO: 17368
  GFR-binding peptide
  MOD_RES (37)..(37): Xaa is C or S
  MOD_RES (13)..(14)..(15)..(16)..(17): Xaa is A or G
  MOD_RES (18)..(19)..(20)..(21): Xaa is A or G or is absent

SEQ ID NO: 82139 - protein, 34 aa, Artificial Sequence; identical to SEQ ID NO: 50625
  GFR-binding peptide
  MOD_RES (2)..(4): Xaa is C or S

SEQ ID NO: 82140 - protein, 39 aa, Artificial Sequence; identical to SEQ ID NO: 46804
  GFR-binding peptide
  MOD_RES (2)..(4)..(35)..(36): Xaa is C or S

SEQ ID NO: 82141 - protein, 36 aa, Artificial Sequence; identical to SEQ ID NO: 46808
  GFR-binding peptide
  MOD_RES (2)..(33)..(34): Xaa is C or S

SEQ ID NO: 82142 - protein, 39 aa, Artificial Sequence; identical to SEQ ID NO: 18185
  GFR-binding peptide
  MOD_RES (35)..(35): Xaa is C or S

SEQ ID NO: 82143 - protein, 35 aa, Artificial Sequence; identical to SEQ ID NO: 17371
  GFR-binding peptide
  MOD_RES (1)..(1): Xaa is C or S

SEQ ID NO: 82144 - protein, 39 aa, Artificial Sequence; identical to SEQ ID NO: 48081
  GFR-binding peptide
  MOD_RES (2)..(4)..(35)..(36): Xaa is C or S

SEQ ID NO: 82145 - protein, 44 aa, Artificial Sequence; identical to SEQ ID NO: 17374
  GFR-binding peptide
  MOD_RES (2)..(4)..(38): Xaa is C or S
  MOD_RES (16)..(17)..(18)..(19)..(20): Xaa is A or G
  MOD_RES (21)..(22)..(23)..(24): Xaa is A or G or is absent

SEQ ID NO: 82146 - protein, 40 aa, Artificial Sequence; identical to SEQ ID NO: 17375
  GFR-binding peptide
  MOD_RES (2)..(4)..(38): Xaa is C or S
  MOD_RES (16)..(17)..(18)..(19)..(20): Xaa is A or G
  MOD_RES (21)..(22)..(23)..(24): Xaa is A or G or is absent

SEQ ID NO: 82147 - protein, 37 aa, Artificial Sequence; identical to SEQ ID NO: 46815
  GFR-binding peptide
  MOD_RES (1)..(34)..(35): Xaa is C or S
  MOD_RES (12)..(13)..(14)..(15)..(16): Xaa is A or G
  MOD_RES (17)..(18)..(19)..(20): Xaa is A or G or is absent

SEQ ID NO: 82148 - protein, 42 aa, Artificial Sequence; identical to SEQ ID NO: 18194
  GFR-binding peptide
  MOD_RES (2)..(36): Xaa is C or S

SEQ ID NO: 82149 - protein, 42 aa, Artificial Sequence; identical to SEQ ID NO: 17376
  GFR-binding peptide
  MOD_RES (2)..(36): Xaa is C or S

SEQ ID NO: 82150 - protein, 42 aa, Artificial Sequence; identical to SEQ ID NO: 18198
  GFR-binding peptide
  MOD_RES (2)..(4)..(41): Xaa is C or S

SEQ ID NO: 82151 - protein, 34 aa, Artificial Sequence; identical to SEQ ID NO: 17377
  GFR-binding peptide

SEQ ID NO: 82152 - protein, 35 aa, Artificial Sequence; identical to SEQ ID NO: 50639
  GFR-binding peptide
  MOD_RES (1)..(34)..(35): Xaa is C or S
  MOD_RES (12)..(13)..(14)..(15)..(16): Xaa is A or G
  MOD_RES (17)..(18)..(19)..(20): Xaa is A or G or is absent

SEQ ID NO: 82153 - protein, 42 aa, Artificial Sequence; identical to SEQ ID NO: 18200
  GFR-binding peptide
  MOD_RES (2)..(4)..(41): Xaa is C or S

SEQ ID NO: 82154 - protein, 44 aa, Artificial Sequence; identical to SEQ ID NO: 18201
  GFR-binding peptide
  MOD_RES (2)..(4)..(41): Xaa is C or S
  MOD_RES (17)..(18)..(19)..(20)..(21): Xaa is A or G
  MOD_RES (22)..(23)..(24)..(25): Xaa is A or G or is absent

SEQ ID NO: 82155 - protein, 41 aa, Artificial Sequence; identical to SEQ ID NO: 18203
  GFR-binding peptide
  MOD_RES (2)..(4)..(41): Xaa is C or S

SEQ ID NO: 82156 - protein, 39 aa, Artificial Sequence; identical to SEQ ID NO: 46832
  GFR-binding peptide
  MOD_RES (2)..(35)..(36): Xaa is C or S
  MOD_RES (13)..(14)..(15)..(16)..(17): Xaa is A or G
  MOD_RES (18)..(19)..(20)..(21): Xaa is A or G or is absent

SEQ ID NO: 82157 - protein, 39 aa, Artificial Sequence; identical to SEQ ID NO: 18205
  GFR-binding peptide
  MOD_RES (1)..(38): Xaa is C or S
  MOD_RES (14)..(15)..(16)..(17)..(18): Xaa is A or G
  MOD_RES (19)..(20)..(21)..(22): Xaa is A or G or is absent

SEQ ID NO: 82158 - protein, 36 aa, Artificial Sequence; identical to SEQ ID NO: 17381
  GFR-binding peptide
  MOD_RES (1)..(35): Xaa is C or S

SEQ ID NO: 82159 - protein, 39 aa, Artificial Sequence; identical to SEQ ID NO: 18207
  GFR-binding peptide
  MOD_RES (35)..(35): Xaa is C or S

SEQ ID NO: 82160 - protein, 40 aa, Artificial Sequence; identical to SEQ ID NO: 48108
  GFR-binding peptide
  MOD_RES (1)..(3)..(36)..(37): Xaa is C or S
  MOD_RES (14)..(15)..(16)..(17)..(18): Xaa is A or G
  MOD_RES (19)..(20)..(21)..(22): Xaa is A or G or is absent

SEQ ID NO: 82161 - protein, 34 aa, Artificial Sequence; identical to SEQ ID NO: 17383
  GFR-binding peptide

SEQ ID NO: 82162 - protein, 37 aa, Artificial Sequence; identical to SEQ ID NO: 50653
  GFR-binding peptide
  MOD_RES (2)..(35)..(36): Xaa is C or S
  MOD_RES (13)..(14)..(15)..(16)..(17): Xaa is A or G
  MOD_RES (18)..(19)..(20)..(21): Xaa is A or G or is absent

SEQ ID NO: 82163 - protein, 34 aa, Artificial Sequence; identical to SEQ ID NO: 18211
  GFR-binding peptide

SEQ ID NO: 82164 - protein, 42 aa, Artificial Sequence; identical to SEQ ID NO: 18213
  GFR-binding peptide
  MOD_RES (2)..(4)..(41): Xaa is C or S
  MOD_RES (17)..(18)..(19)..(20)..(21): Xaa is A or G
  MOD_RES (22)..(23)..(24)..(25): Xaa is A or G or is absent

SEQ ID NO: 82165 - protein, 39 aa, Artificial Sequence; identical to SEQ ID NO: 17384
  GFR-binding peptide
  MOD_RES (2)..(36): Xaa is C or S

SEQ ID NO: 82166 - protein, 36 aa, Artificial Sequence; identical to SEQ ID NO: 17385
  GFR-binding peptide
  MOD_RES (35)..(35): Xaa is C or S
  MOD_RES (11)..(12)..(13)..(14)..(15): Xaa is A or G
  MOD_RES (16)..(17)..(18)..(19): Xaa is A or G or is absent

SEQ ID NO: 82167 - protein, 41 aa, Artificial Sequence; identical to SEQ ID NO: 17388
  GFR-binding peptide
  MOD_RES (1)..(38): Xaa is C or S
  MOD_RES (14)..(15)..(16)..(17)..(18): Xaa is A or G
  MOD_RES (19)..(20)..(21)..(22): Xaa is A or G or is absent

SEQ ID NO: 82168 - protein, 33 aa, Artificial Sequence; identical to SEQ ID NO: 50659
  GFR-binding peptide
  MOD_RES (1)..(1): Xaa is C or S
  MOD_RES (12)..(13)..(14)..(15)..(16): Xaa is A or G
  MOD_RES (17)..(18)..(19)..(20): Xaa is A or G or is absent

SEQ ID NO: 82169 - protein, 44 aa, Artificial Sequence; identical to SEQ ID NO: 18214
  GFR-binding peptide
  MOD_RES (1)..(3)..(40): Xaa is C or S

SEQ ID NO: 82170 - protein, 40 aa, Artificial Sequence; identical to SEQ ID NO: 18215
  GFR-binding peptide
  MOD_RES (1)..(3)..(40): Xaa is C or S

SEQ ID NO: 82171 - protein, 34 aa, Artificial Sequence; identical to SEQ ID NO: 49398
  GFR-binding peptide
  MOD_RES (2)..(33)..(34): Xaa is C or S

SEQ ID NO: 82172 - protein, 36 aa, Artificial Sequence; identical to SEQ ID NO: 49402
  GFR-binding peptide
  MOD_RES (31)..(32): Xaa is C or S

SEQ ID NO: 82173 - protein, 43 aa, Artificial Sequence; identical to SEQ ID NO: 17390
  GFR-binding peptide
  MOD_RES (2)..(4)..(38): Xaa is C or S

SEQ ID NO: 82174 - protein, 40 aa, Artificial Sequence; identical to SEQ ID NO: 17391
  GFR-binding peptide
  MOD_RES (1)..(3)..(40): Xaa is C or S

SEQ ID NO: 82175 - protein, 38 aa, Artificial Sequence; identical to SEQ ID NO: 18220
  GFR-binding peptide
  MOD_RES (37)..(37): Xaa is C or S

SEQ ID NO: 82176 - protein, 39 aa, Artificial Sequence; identical to SEQ ID NO: 18222
  GFR-binding peptide
  MOD_RES (2)..(39): Xaa is C or S

SEQ ID NO: 82177 - protein, 37 aa, Artificial Sequence; identical to SEQ ID NO: 18223
  GFR-binding peptide
  MOD_RES (34)..(34): Xaa is C or S

SEQ ID NO: 82178 - protein, 37 aa, Artificial Sequence; identical to SEQ ID NO: 49406
  GFR-binding peptide
  MOD_RES (31)..(32): Xaa is C or S

SEQ ID NO: 82179 - protein, 33 aa, Artificial Sequence; identical to SEQ ID NO: 17393
  GFR-binding peptide

SEQ ID NO: 82180 - protein, 39 aa, Artificial Sequence; identical to SEQ ID NO: 17394
  GFR-binding peptide
  MOD_RES (36)..(36): Xaa is C or S
  MOD_RES (12)..(13)..(14)..(15)..(16): Xaa is A or G
  MOD_RES (17)..(18)..(19)..(20): Xaa is A or G or is absent

SEQ ID NO: 82181 - protein, 42 aa, Artificial Sequence; identical to SEQ ID NO: 18225
  GFR-binding peptide
  MOD_RES (2)..(4)..(38): Xaa is C or S

SEQ ID NO: 82182 - protein, 35 aa, Artificial Sequence; identical to SEQ ID NO: 49408
  GFR-binding peptide
  MOD_RES (2)..(33)..(34): Xaa is C or S

SEQ ID NO: 82183 - protein, 39 aa, Artificial Sequence; identical to SEQ ID NO: 18226
  GFR-binding peptide
  MOD_RES (2)..(4): Xaa is C or S

SEQ ID NO: 82184 - protein, 36 aa, Artificial Sequence; identical to SEQ ID NO: 18227
  GFR-binding peptide
  MOD_RES (35)..(35): Xaa is C or S
  MOD_RES (11)..(12)..(13)..(14)..(15): Xaa is A or G
  MOD_RES (16)..(17)..(18)..(19): Xaa is A or G or is absent

SEQ ID NO: 82185 - protein, 36 aa, Artificial Sequence; identical to SEQ ID NO: 17395
  GFR-binding peptide
  MOD_RES (2)..(2): Xaa is C or S

SEQ ID NO: 82186 - protein, 38 aa, Artificial Sequence; identical to SEQ ID NO: 48128
  GFR-binding peptide
  MOD_RES (1)..(34)..(35): Xaa is C or S
  MOD_RES (12)..(13)..(14)..(15)..(16): Xaa is A or G
  MOD_RES (17)..(18)..(19)..(20): Xaa is A or G or is absent

SEQ ID NO: 82187 - protein, 40 aa, Artificial Sequence; identical to SEQ ID NO: 17397
  GFR-binding peptide
  MOD_RES (1)..(3)..(37): Xaa is C or S

SEQ ID NO: 82188 - protein, 40 aa, Artificial Sequence; identical to SEQ ID NO: 17398
  GFR-binding peptide
  MOD_RES (2)..(36): Xaa is C or S

SEQ ID NO: 82189 - protein, 34 aa, Artificial Sequence; identical to SEQ ID NO: 49420
  GFR-binding peptide
  MOD_RES (33)..(34): Xaa is C or S
  MOD_RES (11)..(12)..(13)..(14)..(15): Xaa is A or G
  MOD_RES (16)..(17)..(18)..(19): Xaa is A or G or is absent

SEQ ID NO: 82190 - protein, 35 aa, Artificial Sequence; identical to SEQ ID NO: 48135
  GFR-binding peptide
  MOD_RES (2)..(35): Xaa is C or S
  MOD_RES (13)..(14)..(15)..(16)..(17): Xaa is A or G
  MOD_RES (18)..(19)..(20)..(21): Xaa is A or G or is absent

SEQ ID NO: 82191 - protein, 39 aa, Artificial Sequence; identical to SEQ ID NO: 46862
  GFR-binding peptide
  MOD_RES (2)..(35)..(36): Xaa is C or S
  MOD_RES (13)..(14)..(15)..(16)..(17): Xaa is A or G
  MOD_RES (18)..(19)..(20)..(21): Xaa is A or G or is absent

SEQ ID NO: 82192 - protein, 38 aa, Artificial Sequence; identical to SEQ ID NO: 50686
  GFR-binding peptide
  MOD_RES (2)..(35)..(36): Xaa is C or S
  MOD_RES (13)..(14)..(15)..(16)..(17): Xaa is A or G
  MOD_RES (18)..(19)..(20)..(21): Xaa is A or G or is absent

SEQ ID NO: 82193 - protein, 38 aa, Artificial Sequence; identical to SEQ ID NO: 18240
  GFR-binding peptide
  MOD_RES (1)..(3)..(37): Xaa is C or S

SEQ ID NO: 82194 - protein, 38 aa, Artificial Sequence; identical to SEQ ID NO: 46868
  GFR-binding peptide
  MOD_RES (2)..(33)..(34): Xaa is C or S

SEQ ID NO: 82195 - protein, 39 aa, Artificial Sequence; identical to SEQ ID NO: 17401
  GFR-binding peptide
  MOD_RES (33)..(33): Xaa is C or S

SEQ ID NO: 82196 - protein, 41 aa, Artificial Sequence; identical to SEQ ID NO: 46869
  GFR-binding peptide
  MOD_RES (2)..(4)..(37)..(38): Xaa is C or S
  MOD_RES (15)..(16)..(17)..(18)..(19): Xaa is A or G
  MOD_RES (20)..(21)..(22)..(23): Xaa is A or G or is absent

SEQ ID NO: 82197 - protein, 42 aa, Artificial Sequence; identical to SEQ ID NO: 18243
  GFR-binding peptide
  MOD_RES (1)..(3)..(40): Xaa is C or S
  MOD_RES (16)..(17)..(18)..(19)..(20): Xaa is A or G
  MOD_RES (21)..(22)..(23)..(24): Xaa is A or G or is absent

SEQ ID NO: 82198 - protein, 42 aa, Artificial Sequence; identical to SEQ ID NO: 18244
  GFR-binding peptide
  MOD_RES (1)..(38): Xaa is C or S

SEQ ID NO: 82199 - protein, 33 aa, Artificial Sequence; identical to SEQ ID NO: 17402
  GFR-binding peptide
  MOD_RES (11)..(12)..(13)..(14)..(15): Xaa is A or G
  MOD_RES (16)..(17)..(18)..(19): Xaa is A or G or is absent

SEQ ID NO: 82200 - protein, 38 aa, Artificial Sequence; identical to SEQ ID NO: 17403
  GFR-binding peptide
  MOD_RES (1)..(38): Xaa is C or S

SEQ ID NO: 82201 - protein, 34 aa, Artificial Sequence; identical to SEQ ID NO: 46873
  GFR-binding peptide
  MOD_RES (33)..(34): Xaa is C or S
  MOD_RES (11)..(12)..(13)..(14)..(15): Xaa is A or G
  MOD_RES (16)..(17)..(18)..(19): Xaa is A or G or is absent

SEQ ID NO: 82202 - protein, 38 aa, Artificial Sequence; identical to SEQ ID NO: 17406
  GFR-binding peptide
  MOD_RES (36)..(36): Xaa is C or S
  MOD_RES (12)..(13)..(14)..(15)..(16): Xaa is A or G
  MOD_RES (17)..(18)..(19)..(20): Xaa is A or G or is absent

SEQ ID NO: 82203 - protein, 39 aa, Artificial Sequence; identical to SEQ ID NO: 17407
  GFR-binding peptide
  MOD_RES (33)..(33): Xaa is C or S

SEQ ID NO: 82204 - protein, 37 aa, Artificial Sequence; identical to SEQ ID NO: 17410
  GFR-binding peptide
  MOD_RES (37)..(37): Xaa is C or S
  MOD_RES (13)..(14)..(15)..(16)..(17): Xaa is A or G
  MOD_RES (18)..(19)..(20)..(21): Xaa is A or G or is absent

SEQ ID NO: 82205 - protein, 38 aa, Artificial Sequence; identical to SEQ ID NO: 17411
  GFR-binding peptide
  MOD_RES (33)..(33): Xaa is C or S

SEQ ID NO: 82206 - protein, 36 aa, Artificial Sequence; identical to SEQ ID NO: 49455
  GFR-binding peptide
  MOD_RES (1)..(3)..(34)..(35): Xaa is C or S

SEQ ID NO: 82207 - protein, 33 aa, Artificial Sequence; identical to SEQ ID NO: 17413
  GFR-binding peptide
  MOD_RES (11)..(12)..(13)..(14)..(15): Xaa is A or G
  MOD_RES (16)..(17)..(18)..(19): Xaa is A or G or is absent

SEQ ID NO: 82208 - protein, 37 aa, Artificial Sequence; identical to SEQ ID NO: 17415
  GFR-binding peptide
  MOD_RES (2)..(2): Xaa is C or S

SEQ ID NO: 82209 - protein, 38 aa, Artificial Sequence; identical to SEQ ID NO: 17416
  GFR-binding peptide
  MOD_RES (2)..(36): Xaa is C or S
  MOD_RES (14)..(15)..(16)..(17)..(18): Xaa is A or G
  MOD_RES (19)..(20)..(21)..(22): Xaa is A or G or is absent

SEQ ID NO: 82210 - protein, 36 aa, Artificial Sequence; identical to SEQ ID NO: 17417
  GFR-binding peptide
  MOD_RES (13)..(14)..(15)..(16)..(17): Xaa is A or G
  MOD_RES (18)..(19)..(20)..(21): Xaa is A or G or is absent

SEQ ID NO: 82211 - protein, 40 aa, Artificial Sequence; identical to SEQ ID NO: 48166
  GFR-binding peptide
  MOD_RES (1)..(3)..(36)..(37): Xaa is C or S
  MOD_RES (14)..(15)..(16)..(17)..(18): Xaa is A or G
  MOD_RES (19)..(20)..(21)..(22): Xaa is A or G or is absent

SEQ ID NO: 82212 - protein, 38 aa, Artificial Sequence; identical to SEQ ID NO: 17418
  GFR-binding peptide
  MOD_RES (1)..(3)..(37): Xaa is C or S
  MOD_RES (15)..(16)..(17)..(18)..(19): Xaa is A or G
  MOD_RES (20)..(21)..(22)..(23): Xaa is A or G or is absent

SEQ ID NO: 82213 - protein, 38 aa, Artificial Sequence; identical to SEQ ID NO: 50710
  GFR-binding peptide
  MOD_RES (2)..(4)..(35)..(36): Xaa is C or S

SEQ ID NO: 82214 - protein, 35 aa, Artificial Sequence; identical to SEQ ID NO: 46884
  GFR-binding peptide
  MOD_RES (31)..(32): Xaa is C or S

SEQ ID NO: 82215 - protein, 36 aa, Artificial Sequence; identical to SEQ ID NO: 17419
  GFR-binding peptide
  MOD_RES (2)..(2): Xaa is C or S
  MOD_RES (15)..(16)..(17)..(18)..(19): Xaa is A or G
  MOD_RES (20)..(21)..(22)..(23): Xaa is A or G or is absent

SEQ ID NO: 82216 - protein, 36 aa, Artificial Sequence; identical to SEQ ID NO: 50713
  GFR-binding peptide
  MOD_RES (31)..(32): Xaa is C or S

SEQ ID NO: 82217 - protein, 41 aa, Artificial Sequence; identical to SEQ ID NO: 18250
  GFR-binding peptide
  MOD_RES (2)..(39): Xaa is C or S
  MOD_RES (15)..(16)..(17)..(18)..(19): Xaa is A or G
  MOD_RES (20)..(21)..(22)..(23): Xaa is A or G or is absent

SEQ ID NO: 82218 - protein, 35 aa, Artificial Sequence; identical to SEQ ID NO: 49468
  GFR-binding peptide
  MOD_RES (1)..(3): Xaa is C or S
  MOD_RES (14)..(15)..(16)..(17)..(18): Xaa is A or G
  MOD_RES (19)..(20)..(21)..(22): Xaa is A or G or is absent

SEQ ID NO: 82219 - protein, 35 aa, Artificial Sequence; identical to SEQ ID NO: 18252
  GFR-binding peptide
  MOD_RES (13)..(14)..(15)..(16)..(17): Xaa is A or G
  MOD_RES (18)..(19)..(20)..(21): Xaa is A or G or is absent

SEQ ID NO: 82220 - protein, 36 aa, Artificial Sequence; identical to SEQ ID NO: 48171
  GFR-binding peptide
  MOD_RES (2)..(35)..(36): Xaa is C or S
  MOD_RES (13)..(14)..(15)..(16)..(17): Xaa is A or G
  MOD_RES (18)..(19)..(20)..(21): Xaa is A or G or is absent

SEQ ID NO: 82221 - protein, 40 aa, Artificial Sequence; identical to SEQ ID NO: 17422
  GFR-binding peptide
  MOD_RES (2)..(4): Xaa is C or S

SEQ ID NO: 82222 - protein, 34 aa, Artificial Sequence; identical to SEQ ID NO: 46895
  GFR-binding peptide
  MOD_RES (33)..(34): Xaa is C or S
  MOD_RES (11)..(12)..(13)..(14)..(15): Xaa is A or G
  MOD_RES (16)..(17)..(18)..(19): Xaa is A or G or is absent

SEQ ID NO: 82223 - protein, 36 aa, Artificial Sequence; identical to SEQ ID NO: 49472
  GFR-binding peptide
  MOD_RES (1)..(3)..(34)..(35): Xaa is C or S

SEQ ID NO: 82224 - protein, 34 aa, Artificial Sequence; identical to SEQ ID NO: 49473
  GFR-binding peptide
  MOD_RES (33)..(34): Xaa is C or S
  MOD_RES (11)..(12)..(13)..(14)..(15): Xaa is A or G
  MOD_RES (16)..(17)..(18)..(19): Xaa is A or G or is absent

SEQ ID NO: 82225 - protein, 39 aa, Artificial Sequence; identical to SEQ ID NO: 18254
  GFR-binding peptide
  MOD_RES (1)..(35): Xaa is C or S
  MOD_RES (13)..(14)..(15)..(16)..(17): Xaa is A or G
  MOD_RES (18)..(19)..(20)..(21): Xaa is A or G or is absent

SEQ ID NO: 82226 - protein, 38 aa, Artificial Sequence; identical to SEQ ID NO: 18255
  GFR-binding peptide
  MOD_RES (2)..(4): Xaa is C or S

SEQ ID NO: 82227 - protein, 33 aa, Artificial Sequence; identical to SEQ ID NO: 48178
  GFR-binding peptide
  MOD_RES (2)..(33): Xaa is C or S

SEQ ID NO: 82228 - protein, 40 aa, Artificial Sequence; identical to SEQ ID NO: 17426
  GFR-binding peptide
  MOD_RES (1)..(3)..(37): Xaa is C or S
  MOD_RES (15)..(16)..(17)..(18)..(19): Xaa is A or G
  MOD_RES (20)..(21)..(22)..(23): Xaa is A or G or is absent

SEQ ID NO: 82229 - protein, 36 aa, Artificial Sequence; identical to SEQ ID NO: 18256
  GFR-binding peptide
  MOD_RES (34)..(34): Xaa is C or S

SEQ ID NO: 82230 - protein, 43 aa, Artificial Sequence; identical to SEQ ID NO: 17427
  GFR-binding peptide
  MOD_RES (2)..(4)..(38): Xaa is C or S
  MOD_RES (16)..(17)..(18)..(19)..(20): Xaa is A or G
  MOD_RES (21)..(22)..(23)..(24): Xaa is A or G or is absent

SEQ ID NO: 82231 - protein, 42 aa, Artificial Sequence; identical to SEQ ID NO: 18258
  GFR-binding peptide
  MOD_RES (2)..(36): Xaa is C or S
  MOD_RES (14)..(15)..(16)..(17)..(18): Xaa is A or G
  MOD_RES (19)..(20)..(21)..(22): Xaa is A or G or is absent

SEQ ID NO: 82232 - protein, 36 aa, Artificial Sequence; identical to SEQ ID NO: 18259
  GFR-binding peptide
  MOD_RES (2)..(36): Xaa is C or S

SEQ ID NO: 82233 - protein, 38 aa, Artificial Sequence; identical to SEQ ID NO: 18263
  GFR-binding peptide
  MOD_RES (34)..(34): Xaa is C or S

SEQ ID NO: 82234 - protein, 40 aa, Artificial Sequence; identical to SEQ ID NO: 48187
  GFR-binding peptide
  MOD_RES (1)..(3)..(34)..(35): Xaa is C or S

SEQ ID NO: 82235 - protein, 33 aa, Artificial Sequence; identical to SEQ ID NO: 49484
  GFR-binding peptide
  MOD_RES (31)..(32): Xaa is C or S

SEQ ID NO: 82236 - protein, 41 aa, Artificial Sequence; identical to SEQ ID NO: 18264
  GFR-binding peptide
  MOD_RES (2)..(39): Xaa is C or S

SEQ ID NO: 82237 - protein, 35 aa, Artificial Sequence; identical to SEQ ID NO: 18265
  GFR-binding peptide
  MOD_RES (2)..(2): Xaa is C or S

SEQ ID NO: 82238 - protein, 39 aa, Artificial Sequence; identical to SEQ ID NO: 18266
  GFR-binding peptide
  MOD_RES (2)..(4): Xaa is C or S
  MOD_RES (17)..(18)..(19)..(20)..(21): Xaa is A or G
  MOD_RES (22)..(23)..(24)..(25): Xaa is A or G or is absent

SEQ ID NO: 82239 - protein, 40 aa, Artificial Sequence; identical to SEQ ID NO: 17432
  GFR-binding peptide
  MOD_RES (36)..(36): Xaa is C or S
  MOD_RES (12)..(13)..(14)..(15)..(16): Xaa is A or G
  MOD_RES (17)..(18)..(19)..(20): Xaa is A or G or is absent

SEQ ID NO: 82240 - protein, 37 aa, Artificial Sequence; identical to SEQ ID NO: 48193
  GFR-binding peptide
  MOD_RES (33)..(34): Xaa is C or S
  MOD_RES (11)..(12)..(13)..(14)..(15): Xaa is A or G
  MOD_RES (16)..(17)..(18)..(19): Xaa is A or G or is absent

SEQ ID NO: 82241 - protein, 37 aa, Artificial Sequence; identical to SEQ ID NO: 49488
  GFR-binding peptide
  MOD_RES (33)..(34): Xaa is C or S
  MOD_RES (11)..(12)..(13)..(14)..(15): Xaa is A or G
  MOD_RES (16)..(17)..(18)..(19): Xaa is A or G or is absent

SEQ ID NO: 82242 - protein, 34 aa, Artificial Sequence; identical to SEQ ID NO: 18268
  GFR-binding peptide

SEQ ID NO: 82243 - protein, 32 aa, Artificial Sequence; identical to SEQ ID NO: 48195
  GFR-binding peptide
  MOD_RES (31)..(32): Xaa is C or S

SEQ ID NO: 82244 - protein, 34 aa, Artificial Sequence; identical to SEQ ID NO: 46912
  GFR-binding peptide
  MOD_RES (2)..(2): Xaa is C or S
  MOD_RES (13)..(14)..(15)..(16)..(17): Xaa is A or G
  MOD_RES (18)..(19)..(20)..(21): Xaa is A or G or is absent

SEQ ID NO: 82245 - protein, 37 aa, Artificial Sequence; identical to SEQ ID NO: 18269
  GFR-binding peptide
  MOD_RES (33)..(33): Xaa is C or S
  MOD_RES (11)..(12)..(13)..(14)..(15): Xaa is A or G
  MOD_RES (16)..(17)..(18)..(19): Xaa is A or G or is absent

SEQ ID NO: 82246 - protein, 36 aa, Artificial Sequence; identical to SEQ ID NO: 48199
  GFR-binding peptide
  MOD_RES (1)..(34)..(35): Xaa is C or S
  MOD_RES (12)..(13)..(14)..(15)..(16): Xaa is A or G
  MOD_RES (17)..(18)..(19)..(20): Xaa is A or G or is absent

SEQ ID NO: 82247 - protein, 39 aa, Artificial Sequence; identical to SEQ ID NO: 18270
  GFR-binding peptide
  MOD_RES (2)..(4)..(38): Xaa is C or S
  MOD_RES (16)..(17)..(18)..(19)..(20): Xaa is A or G
  MOD_RES (21)..(22)..(23)..(24): Xaa is A or G or is absent

SEQ ID NO: 82248 - protein, 40 aa, Artificial Sequence; identical to SEQ ID NO: 18271
  GFR-binding peptide
  MOD_RES (34)..(34): Xaa is C or S

SEQ ID NO: 82249 - protein, 39 aa, Artificial Sequence; identical to SEQ ID NO: 17435
  GFR-binding peptide
  MOD_RES (1)..(35): Xaa is C or S

SEQ ID NO: 82250 - protein, 35 aa, Artificial Sequence; identical to SEQ ID NO: 18273
  GFR-binding peptide
  MOD_RES (34)..(34): Xaa is C or S

SEQ ID NO: 82251 - protein, 41 aa, Artificial Sequence; identical to SEQ ID NO: 17436
  GFR-binding peptide
  MOD_RES (1)..(3)..(37): Xaa is C or S

SEQ ID NO: 82252 - protein, 31 aa, Artificial Sequence; identical to SEQ ID NO: 48203
  GFR-binding peptide
  MOD_RES (31)..(31): Xaa is C or S

SEQ ID NO: 82253 - protein, 38 aa, Artificial Sequence; identical to SEQ ID NO: 18275
  GFR-binding peptide
  MOD_RES (1)..(35): Xaa is C or S

SEQ ID NO: 82254 - protein, 38 aa, Artificial Sequence; identical to SEQ ID NO: 18277
  GFR-binding peptide
  MOD_RES (2)..(4): Xaa is C or S
  MOD_RES (17)..(18)..(19)..(20)..(21): Xaa is A or G
  MOD_RES (22)..(23)..(24)..(25): Xaa is A or G or is absent

SEQ ID NO: 82255 - protein, 35 aa, Artificial Sequence; identical to SEQ ID NO: 18278
  GFR-binding peptide
  MOD_RES (35)..(35): Xaa is C or S

SEQ ID NO: 82256 - protein, 38 aa, Artificial Sequence; identical to SEQ ID NO: 17440
  GFR-binding peptide
  MOD_RES (1)..(3): Xaa is C or S

SEQ ID NO: 82257 - protein, 39 aa, Artificial Sequence; identical to SEQ ID NO: 18280
  GFR-binding peptide
  MOD_RES (33)..(33): Xaa is C or S
  MOD_RES (11)..(12)..(13)..(14)..(15): Xaa is A or G
  MOD_RES (16)..(17)..(18)..(19): Xaa is A or G or is absent

SEQ ID NO: 82258 - protein, 39 aa, Artificial Sequence; identical to SEQ ID NO: 49500
  GFR-binding peptide
  MOD_RES (2)..(4)..(37)..(38): Xaa is C or S
  MOD_RES (15)..(16)..(17)..(18)..(19): Xaa is A or G
  MOD_RES (20)..(21)..(22)..(23): Xaa is A or G or is absent

SEQ ID NO: 82259 - protein, 36 aa, Artificial Sequence; identical to SEQ ID NO: 18281
  GFR-binding peptide
  MOD_RES (2)..(36): Xaa is C or S

SEQ ID NO: 82260 - protein, 40 aa, Artificial Sequence; identical to SEQ ID NO: 17446
  GFR-binding peptide
  MOD_RES (1)..(35): Xaa is C or S

SEQ ID NO: 82261 - protein, 35 aa, Artificial Sequence; identical to SEQ ID NO: 50762
  GFR-binding peptide
  MOD_RES (1)..(34)..(35): Xaa is C or S
  MOD_RES (12)..(13)..(14)..(15)..(16): Xaa is A or G
  MOD_RES (17)..(18)..(19)..(20): Xaa is A or G or is absent

SEQ ID NO: 82262 - protein, 39 aa, Artificial Sequence; identical to SEQ ID NO: 17447
  GFR-binding peptide
  MOD_RES (37)..(37): Xaa is C or S
  MOD_RES (13)..(14)..(15)..(16)..(17): Xaa is A or G
  MOD_RES (18)..(19)..(20)..(21): Xaa is A or G or is absent

SEQ ID NO: 82263 - protein, 35 aa, Artificial Sequence; identical to SEQ ID NO: 18282
  GFR-binding peptide
  MOD_RES (34)..(34): Xaa is C or S

SEQ ID NO: 82264 - protein, 37 aa, Artificial Sequence; identical to SEQ ID NO: 46927
  GFR-binding peptide
  MOD_RES (1)..(34)..(35): Xaa is C or S
  MOD_RES (12)..(13)..(14)..(15)..(16): Xaa is A or G
  MOD_RES (17)..(18)..(19)..(20): Xaa is A or G or is absent

SEQ ID NO: 82265 - protein, 41 aa, Artificial Sequence; identical to SEQ ID NO: 48216
  GFR-binding peptide
  MOD_RES (2)..(35)..(36): Xaa is C or S
  MOD_RES (13)..(14)..(15)..(16)..(17): Xaa is A or G
  MOD_RES (18)..(19)..(20)..(21): Xaa is A or G or is absent

SEQ ID NO: 82266 - protein, 30 aa, Artificial Sequence; identical to SEQ ID NO: 49504
  GFR-binding peptide

SEQ ID NO: 82267 - protein, 38 aa, Artificial Sequence; identical to SEQ ID NO: 17449
  GFR-binding peptide
  MOD_RES (1)..(3)..(37): Xaa is C or S

SEQ ID NO: 82268 - protein, 32 aa, Artificial Sequence; identical to SEQ ID NO: 49509
  GFR-binding peptide
  MOD_RES (1)..(32): Xaa is C or S

SEQ ID NO: 82269 - protein, 43 aa, Artificial Sequence; identical to SEQ ID NO: 50764
  GFR-binding peptide
  MOD_RES (2)..(4)..(37)..(38): Xaa is C or S
  MOD_RES (15)..(16)..(17)..(18)..(19): Xaa is A or G
  MOD_RES (20)..(21)..(22)..(23): Xaa is A or G or is absent

SEQ ID NO: 82270 - protein, 37 aa, Artificial Sequence; identical to SEQ ID NO: 49513
  GFR-binding peptide
  MOD_RES (2)..(4)..(37): Xaa is C or S
  MOD_RES (15)..(16)..(17)..(18)..(19): Xaa is A or G
  MOD_RES (20)..(21)..(22)..(23): Xaa is A or G or is absent

SEQ ID NO: 82271 - protein, 41 aa, Artificial Sequence; identical to SEQ ID NO: 49514
  GFR-binding peptide
  MOD_RES (2)..(4)..(37)..(38): Xaa is C or S
  MOD_RES (15)..(16)..(17)..(18)..(19): Xaa is A or G
  MOD_RES (20)..(21)..(22)..(23): Xaa is A or G or is absent

SEQ ID NO: 82272 - protein, 35 aa, Artificial Sequence; identical to SEQ ID NO: 18290
  GFR-binding peptide
  MOD_RES (33)..(33): Xaa is C or S

SEQ ID NO: 82273 - protein, 38 aa, Artificial Sequence; identical to SEQ ID NO: 18292
  GFR-binding peptide
  MOD_RES (1)..(3): Xaa is C or S

SEQ ID NO: 82274 - protein, 32 aa, Artificial Sequence; identical to SEQ ID NO: 18294
  GFR-binding peptide
  MOD_RES (11)..(12)..(13)..(14)..(15): Xaa is A or G
  MOD_RES (16)..(17)..(18)..(19): Xaa is A or G or is absent

SEQ ID NO: 82275 - protein, 40 aa, Artificial Sequence; identical to SEQ ID NO: 46937
  GFR-binding peptide
  MOD_RES (1)..(3)..(34)..(35): Xaa is C or S

SEQ ID NO: 82276 - protein, 33 aa, Artificial Sequence; identical to SEQ ID NO: 49517
  GFR-binding peptide
  MOD_RES (2)..(33): Xaa is C or S

SEQ ID NO: 82277 - protein, 36 aa, Artificial Sequence; identical to SEQ ID NO: 18295
  GFR-binding peptide
  MOD_RES (36)..(36): Xaa is C or S

SEQ ID NO: 82278 - protein, 44 aa, Artificial Sequence; identical to SEQ ID NO: 18297
  GFR-binding peptide
  MOD_RES (2)..(4)..(41): Xaa is C or S
  MOD_RES (17)..(18)..(19)..(20)..(21): Xaa is A or G
  MOD_RES (22)..(23)..(24)..(25): Xaa is A or G or is absent

SEQ ID NO: 82279 - protein, 41 aa, Artificial Sequence; identical to SEQ ID NO: 17455
  GFR-binding peptide
  MOD_RES (37)..(37): Xaa is C or S
  MOD_RES (13)..(14)..(15)..(16)..(17): Xaa is A or G
  MOD_RES (18)..(19)..(20)..(21): Xaa is A or G or is absent

SEQ ID NO: 82280 - protein, 40 aa, Artificial Sequence; identical to SEQ ID NO: 49523
  GFR-binding peptide
  MOD_RES (2)..(4)..(37)..(38): Xaa is C or S
  MOD_RES (15)..(16)..(17)..(18)..(19): Xaa is A or G
  MOD_RES (20)..(21)..(22)..(23): Xaa is A or G or is absent

SEQ ID NO: 82281 - protein, 37 aa, Artificial Sequence; identical to SEQ ID NO: 17456
  GFR-binding peptide
  MOD_RES (1)..(3)..(37): Xaa is C or S

SEQ ID NO: 82282 - protein, 45 aa, Artificial Sequence; identical to SEQ ID NO: 17458
  GFR-binding peptide
  MOD_RES (2)..(4)..(41): Xaa is C or S
  MOD_RES (17)..(18)..(19)..(20)..(21): Xaa is A or G
  MOD_RES (22)..(23)..(24)..(25): Xaa is A or G or is absent

SEQ ID NO: 82283 - protein, 38 aa, Artificial Sequence; identical to SEQ ID NO: 17459
  GFR-binding peptide
  MOD_RES (2)..(4): Xaa is C or S
  MOD_RES (17)..(18)..(19)..(20)..(21): Xaa is A or G
  MOD_RES (22)..(23)..(24)..(25): Xaa is A or G or is absent

SEQ ID NO: 82284 - protein, 34 aa, Artificial Sequence; identical to SEQ ID NO: 46942
  GFR-binding peptide
  MOD_RES (2)..(2): Xaa is C or S
  MOD_RES (13)..(14)..(15)..(16)..(17): Xaa is A or G
  MOD_RES (18)..(19)..(20)..(21): Xaa is A or G or is absent

SEQ ID NO: 82285 - protein, 36 aa, Artificial Sequence; identical to SEQ ID NO: 50776
  GFR-binding peptide
  MOD_RES (33)..(34): Xaa is C or S
  MOD_RES (11)..(12)..(13)..(14)..(15): Xaa is A or G
  MOD_RES (16)..(17)..(18)..(19): Xaa is A or G or is absent

SEQ ID NO: 82286 - protein, 33 aa, Artificial Sequence; identical to SEQ ID NO: 48238
  GFR-binding peptide
  MOD_RES (33)..(33): Xaa is C or S
  MOD_RES (11)..(12)..(13)..(14)..(15): Xaa is A or G
  MOD_RES (16)..(17)..(18)..(19): Xaa is A or G or is absent

SEQ ID NO: 82287 - protein, 38 aa, Artificial Sequence; identical to SEQ ID NO: 17463
  GFR-binding peptide
  MOD_RES (2)..(2): Xaa is C or S

SEQ ID NO: 82288 - protein, 33 aa, Artificial Sequence; identical to SEQ ID NO: 50781
  GFR-binding peptide
  MOD_RES (33)..(33): Xaa is C or S
  MOD_RES (11)..(12)..(13)..(14)..(15): Xaa is A or G
  MOD_RES (16)..(17)..(18)..(19): Xaa is A or G or is absent

SEQ ID NO: 82289 - protein, 39 aa, Artificial Sequence; identical to SEQ ID NO: 18299
  GFR-binding peptide
  MOD_RES (2)..(4)..(38): Xaa is C or S
  MOD_RES (16)..(17)..(18)..(19)..(20): Xaa is A or G
  MOD_RES (21)..(22)..(23)..(24): Xaa is A or G or is absent

SEQ ID NO: 82290 - protein, 38 aa, Artificial Sequence; identical to SEQ ID NO: 46948
  GFR-binding peptide
  MOD_RES (1)..(32)..(33): Xaa is C or S

SEQ ID NO: 82291 - protein, 36 aa, Artificial Sequence; identical to SEQ ID NO: 50784
  GFR-binding peptide
  MOD_RES (33)..(34): Xaa is C or S
  MOD_RES (11)..(12)..(13)..(14)..(15): Xaa is A or G
  MOD_RES (16)..(17)..(18)..(19): Xaa is A or G or is absent

SEQ ID NO: 82292 - protein, 37 aa, Artificial Sequence; identical to SEQ ID NO: 48244
  GFR-binding peptide
  MOD_RES (1)..(3)..(36)..(37): Xaa is C or S
  MOD_RES (14)..(15)..(16)..(17)..(18): Xaa is A or G
  MOD_RES (19)..(20)..(21)..(22): Xaa is A or G or is absent

SEQ ID NO: 82293 - protein, 40 aa, Artificial Sequence; identical to SEQ ID NO: 49540
  GFR-binding peptide
  MOD_RES (2)..(35)..(36): Xaa is C or S
  MOD_RES (13)..(14)..(15)..(16)..(17): Xaa is A or G
  MOD_RES (18)..(19)..(20)..(21): Xaa is A or G or is absent

SEQ ID NO: 82294 - protein, 42 aa, Artificial Sequence; identical to SEQ ID NO: 17465
  GFR-binding peptide
  MOD_RES (2)..(36): Xaa is C or S

SEQ ID NO: 82295 - protein, 39 aa, Artificial Sequence; identical to SEQ ID NO: 18301
  GFR-binding peptide
  MOD_RES (36)..(36): Xaa is C or S
  MOD_RES (12)..(13)..(14)..(15)..(16): Xaa is A or G
  MOD_RES (17)..(18)..(19)..(20): Xaa is A or G or is absent

SEQ ID NO: 82296 - protein, 41 aa, Artificial Sequence; identical to SEQ ID NO: 49545
  GFR-binding peptide
  MOD_RES (1)..(3)..(36)..(37): Xaa is C or S
  MOD_RES (14)..(15)..(16)..(17)..(18): Xaa is A or G
  MOD_RES (19)..(20)..(21)..(22): Xaa is A or G or is absent

SEQ ID NO: 82297 - protein, 38 aa, Artificial Sequence; identical to SEQ ID NO: 48249
  GFR-binding peptide
  MOD_RES (1)..(3)..(36)..(37): Xaa is C or S
  MOD_RES (14)..(15)..(16)..(17)..(18): Xaa is A or G
  MOD_RES (19)..(20)..(21)..(22): Xaa is A or G or is absent

SEQ ID NO: 82298 - protein, 38 aa, Artificial Sequence; identical to SEQ ID NO: 17470
  GFR-binding peptide
  MOD_RES (1)..(3): Xaa is C or S

SEQ ID NO: 82299 - protein, 34 aa, Artificial Sequence; identical to SEQ ID NO: 18302
  GFR-binding peptide
  MOD_RES (33)..(33): Xaa is C or S
  MOD_RES (11)..(12)..(13)..(14)..(15): Xaa is A or G
  MOD_RES (16)..(17)..(18)..(19): Xaa is A or G or is absent

SEQ ID NO: 82300 - protein, 37 aa, Artificial Sequence; identical to SEQ ID NO: 48250
  GFR-binding peptide
  MOD_RES (1)..(34)..(35): Xaa is C or S
  MOD_RES (12)..(13)..(14)..(15)..(16): Xaa is A or G
  MOD_RES (17)..(18)..(19)..(20): Xaa is A or G or is absent

SEQ ID NO: 82301 - protein, 35 aa, Artificial Sequence; identical to SEQ ID NO: 18303
  GFR-binding peptide
  MOD_RES (12)..(13)..(14)..(15)..(16): Xaa is A or G
  MOD_RES (17)..(18)..(19)..(20): Xaa is A or G or is absent

SEQ ID NO: 82302 - protein, 33 aa, Artificial Sequence; identical to SEQ ID NO: 49552
  GFR-binding peptide
  MOD_RES (1)..(1): Xaa is C or S
  MOD_RES (12)..(13)..(14)..(15)..(16): Xaa is A or G
  MOD_RES (17)..(18)..(19)..(20): Xaa is A or G or is absent

SEQ ID NO: 82303 - protein, 43 aa, Artificial Sequence; identical to SEQ ID NO: 18304
  GFR-binding peptide
  MOD_RES (2)..(4)..(41): Xaa is C or S
  MOD_RES (17)..(18)..(19)..(20)..(21): Xaa is A or G
  MOD_RES (22)..(23)..(24)..(25): Xaa is A or G or is absent

SEQ ID NO: 82304 - protein, 39 aa, Artificial Sequence; identical to SEQ ID NO: 49554
  GFR-binding peptide
  MOD_RES (2)..(4)..(37)..(38): Xaa is C or S
  MOD_RES (15)..(16)..(17)..(18)..(19): Xaa is A or G
  MOD_RES (20)..(21)..(22)..(23): Xaa is A or G or is absent

SEQ ID NO: 82305 - protein, 39 aa, Artificial Sequence; identical to SEQ ID NO: 17472
  GFR-binding peptide
  MOD_RES (1)..(38): Xaa is C or S
  MOD_RES (14)..(15)..(16)..(17)..(18): Xaa is A or G
  MOD_RES (19)..(20)..(21)..(22): Xaa is A or G or is absent

SEQ ID NO: 82306 - protein, 40 aa, Artificial Sequence; identical to SEQ ID NO: 17473
  GFR-binding peptide
  MOD_RES (1)..(35): Xaa is C or S

SEQ ID NO: 82307 - protein, 37 aa, Artificial Sequence; identical to SEQ ID NO: 49555
  GFR-binding peptide
  MOD_RES (1)..(34)..(35): Xaa is C or S
  MOD_RES (12)..(13)..(14)..(15)..(16): Xaa is A or G
  MOD_RES (17)..(18)..(19)..(20): Xaa is A or G or is absent

SEQ ID NO: 82308 - protein, 38 aa, Artificial Sequence; identical to SEQ ID NO: 50800
  GFR-binding peptide
  MOD_RES (2)..(4)..(35)..(36): Xaa is C or S

SEQ ID NO: 82309 - protein, 34 aa, Artificial Sequence; identical to SEQ ID NO: 48256
  GFR-binding peptide
  MOD_RES (2)..(2): Xaa is C or S
  MOD_RES (13)..(14)..(15)..(16)..(17): Xaa is A or G
  MOD_RES (18)..(19)..(20)..(21): Xaa is A or G or is absent

SEQ ID NO: 82310 - protein, 40 aa, Artificial Sequence; identical to SEQ ID NO: 48257
  GFR-binding peptide
  MOD_RES (2)..(4)..(35)..(36): Xaa is C or S

SEQ ID NO: 82311 - protein, 34 aa, Artificial Sequence; identical to SEQ ID NO: 50803
  GFR-binding peptide
  MOD_RES (2)..(2): Xaa is C or S
  MOD_RES (13)..(14)..(15)..(16)..(17): Xaa is A or G
  MOD_RES (18)..(19)..(20)..(21): Xaa is A or G or is absent

SEQ ID NO: 82312 - protein, 39 aa, Artificial Sequence; identical to SEQ ID NO: 17474
  GFR-binding peptide
  MOD_RES (1)..(35): Xaa is C or S
  MOD_RES (13)..(14)..(15)..(16)..(17): Xaa is A or G
  MOD_RES (18)..(19)..(20)..(21): Xaa is A or G or is absent

SEQ ID NO: 82313 - protein, 42 aa, Artificial Sequence; identical to SEQ ID NO: 17475
  GFR-binding peptide
  MOD_RES (1)..(3)..(37): Xaa is C or S
  MOD_RES (15)..(16)..(17)..(18)..(19): Xaa is A or G
  MOD_RES (20)..(21)..(22)..(23): Xaa is A or G or is absent

SEQ ID NO: 82314 - protein, 41 aa, Artificial Sequence; identical to SEQ ID NO: 48262
  GFR-binding peptide
  MOD_RES (2)..(4)..(35)..(36): Xaa is C or S

SEQ ID NO: 82315 - protein, 39 aa, Artificial Sequence; identical to SEQ ID NO: 17476
  GFR-binding peptide
  MOD_RES (2)..(4): Xaa is C or S

SEQ ID NO: 82316 - protein, 33 aa, Artificial Sequence; identical to SEQ ID NO: 17477
  GFR-binding peptide

SEQ ID NO: 82317 - protein, 40 aa, Artificial Sequence; identical to SEQ ID NO: 18307
  GFR-binding peptide
  MOD_RES (2)..(36): Xaa is C or S
  MOD_RES (14)..(15)..(16)..(17)..(18): Xaa is A or G
  MOD_RES (19)..(20)..(21)..(22): Xaa is A or G or is absent

SEQ ID NO: 82318 - protein, 36 aa, Artificial Sequence; identical to SEQ ID NO: 49566
  GFR-binding peptide
  MOD_RES (1)..(3)..(34)..(35): Xaa is C or S

SEQ ID NO: 82319 - protein, 31 aa, Artificial Sequence; identical to SEQ ID NO: 50808
  GFR-binding peptide
  MOD_RES (31)..(31): Xaa is C or S

SEQ ID NO: 82320 - protein, 42 aa, Artificial Sequence; identical to SEQ ID NO: 49568
  GFR-binding peptide
  MOD_RES (2)..(4)..(37)..(38): Xaa is C or S
  MOD_RES (15)..(16)..(17)..(18)..(19): Xaa is A or G
  MOD_RES (20)..(21)..(22)..(23): Xaa is A or G or is absent

SEQ ID NO: 82321 - protein, 35 aa, Artificial Sequence; identical to SEQ ID NO: 18308
  GFR-binding peptide
  MOD_RES (2)..(2): Xaa is C or S
  MOD_RES (14)..(15)..(16)..(17)..(18): Xaa is A or G
  MOD_RES (19)..(20)..(21)..(22): Xaa is A or G or is absent

SEQ ID NO: 82322 - protein, 37 aa, Artificial Sequence; identical to SEQ ID NO: 17481
  GFR-binding peptide
  MOD_RES (1)..(1): Xaa is C or S
  MOD_RES (14)..(15)..(16)..(17)..(18): Xaa is A or G
  MOD_RES (19)..(20)..(21)..(22): Xaa is A or G or is absent

SEQ ID NO: 82323 - protein, 39 aa, Artificial Sequence; identical to SEQ ID NO: 46978
  GFR-binding peptide
  MOD_RES (2)..(4)..(35)..(36): Xaa is C or S

SEQ ID NO: 82324 - protein, 37 aa, Artificial Sequence; identical to SEQ ID NO: 17483
  GFR-binding peptide
  MOD_RES (33)..(33): Xaa is C or S
  MOD_RES (11)..(12)..(13)..(14)..(15): Xaa is A or G
  MOD_RES (16)..(17)..(18)..(19): Xaa is A or G or is absent

SEQ ID NO: 82325 - protein, 40 aa, Artificial Sequence; identical to SEQ ID NO: 18309
  GFR-binding peptide
  MOD_RES (2)..(36): Xaa is C or S
  MOD_RES (14)..(15)..(16)..(17)..(18): Xaa is A or G
  MOD_RES (19)..(20)..(21)..(22): Xaa is A or G or is absent

SEQ ID NO: 82326 - protein, 39 aa, Artificial Sequence; identical to SEQ ID NO: 18310
  GFR-binding peptide
  MOD_RES (1)..(3): Xaa is C or S
  MOD_RES (16)..(17)..(18)..(19)..(20): Xaa is A or G
  MOD_RES (21)..(22)..(23)..(24): Xaa is A or G or is absent

SEQ ID NO: 82327 - protein, 41 aa, Artificial Sequence; identical to SEQ ID NO: 50811
  GFR-binding peptide
  MOD_RES (1)..(3)..(36)..(37): Xaa is C or S
  MOD_RES (14)..(15)..(16)..(17)..(18): Xaa is A or G
  MOD_RES (19)..(20)..(21)..(22): Xaa is A or G or is absent

SEQ ID NO: 82328 - protein, 36 aa, Artificial Sequence; identical to SEQ ID NO: 49576
  GFR-binding peptide
  MOD_RES (1)..(3)..(34)..(35): Xaa is C or S

SEQ ID NO: 82329 - protein, 39 aa, Artificial Sequence; identical to SEQ ID NO: 17484
  GFR-binding peptide
  MOD_RES (1)..(35): Xaa is C or S

SEQ ID NO: 82330 - protein, 41 aa, Artificial Sequence; identical to SEQ ID NO: 18311
  GFR-binding peptide
  MOD_RES (37)..(37): Xaa is C or S

SEQ ID NO: 82331 - protein, 38 aa, Artificial Sequence; identical to SEQ ID NO: 46981
  GFR-binding peptide
  MOD_RES (2)..(4)..(37)..(38): Xaa is C or S
  MOD_RES (15)..(16)..(17)..(18)..(19): Xaa is A or G
  MOD_RES (20)..(21)..(22)..(23): Xaa is A or G or is absent

SEQ ID NO: 82332 - protein, 36 aa, Artificial Sequence; identical to SEQ ID NO: 18312
  GFR-binding peptide
  MOD_RES (13)..(14)..(15)..(16)..(17): Xaa is A or G
  MOD_RES (18)..(19)..(20)..(21): Xaa is A or G or is absent

SEQ ID NO: 82333 - protein, 31 aa, Artificial Sequence; identical to SEQ ID NO: 48276
  GFR-binding peptide
  MOD_RES (1)..(1): Xaa is C or S

SEQ ID NO: 82334 - protein, 36 aa, Artificial Sequence; identical to SEQ ID NO: 18313
  GFR-binding peptide
  MOD_RES (1)..(35): Xaa is C or S
  MOD_RES (13)..(14)..(15)..(16)..(17): Xaa is A or G
  MOD_RES (18)..(19)..(20)..(21): Xaa is A or G or is absent

SEQ ID NO: 82335 - protein, 39 aa, Artificial Sequence; identical to SEQ ID NO: 18314
  GFR-binding peptide
  MOD_RES (34)..(34): Xaa is C or S

SEQ ID NO: 82336 - protein, 37 aa, Artificial Sequence; identical to SEQ ID NO: 17488
  GFR-binding peptide
  MOD_RES (1)..(35): Xaa is C or S
  MOD_RES (13)..(14)..(15)..(16)..(17): Xaa is A or G
  MOD_RES (18)..(19)..(20)..(21): Xaa is A or G or is absent

SEQ ID NO: 82337 - protein, 34 aa, Artificial Sequence; identical to SEQ ID NO: 18316
  GFR-binding peptide
  MOD_RES (34)..(34): Xaa is C or S
  MOD_RES (12)..(13)..(14)..(15)..(16): Xaa is A or G
  MOD_RES (17)..(18)..(19)..(20): Xaa is A or G or is absent

SEQ ID NO: 82338 - protein, 38 aa, Artificial Sequence; identical to SEQ ID NO: 17489
  GFR-binding peptide
  MOD_RES (1)..(3)..(37): Xaa is C or S

SEQ ID NO: 82339 - protein, 35 aa, Artificial Sequence; identical to SEQ ID NO: 18317
  GFR-binding peptide
  MOD_RES (12)..(13)..(14)..(15)..(16): Xaa is A or G
  MOD_RES (17)..(18)..(19)..(20): Xaa is A or G or is absent

SEQ ID NO: 82340 - protein, 30 aa, Artificial Sequence; identical to SEQ ID NO: 48280
  GFR-binding peptide

SEQ ID NO: 82341 - protein, 39 aa, Artificial Sequence; identical to SEQ ID NO: 48281
  GFR-binding peptide
  MOD_RES (1)..(3)..(36)..(37): Xaa is C or S
  MOD_RES (14)..(15)..(16)..(17)..(18): Xaa is A or G
  MOD_RES (19)..(20)..(21)..(22): Xaa is A or G or is absent

SEQ ID NO: 82342 - protein, 34 aa, Artificial Sequence; identical to SEQ ID NO: 46992
  GFR-binding peptide
  MOD_RES (31)..(32): Xaa is C or S

SEQ ID NO: 82343 - protein, 44 aa, Artificial Sequence; identical to SEQ ID NO: 18319
  GFR-binding peptide
  MOD_RES (2)..(4)..(38): Xaa is C or S

SEQ ID NO: 82344 - protein, 39 aa, Artificial Sequence; identical to SEQ ID NO: 17492
  GFR-binding peptide
  MOD_RES (2)..(36): Xaa is C or S

SEQ ID NO: 82345 - protein, 36 aa, Artificial Sequence; identical to SEQ ID NO: 18320
  GFR-binding peptide
  MOD_RES (36)..(36): Xaa is C or S

SEQ ID NO: 82346 - protein, 39 aa, Artificial Sequence; identical to SEQ ID NO: 18321
  GFR-binding peptide
  MOD_RES (1)..(3): Xaa is C or S
  MOD_RES (16)..(17)..(18)..(19)..(20): Xaa is A or G
  MOD_RES (21)..(22)..(23)..(24): Xaa is A or G or is absent

SEQ ID NO: 82347 - protein, 43 aa, Artificial Sequence; identical to SEQ ID NO: 18328
  GFR-binding peptide
  MOD_RES (1)..(3)..(40): Xaa is C or S
  MOD_RES (16)..(17)..(18)..(19)..(20): Xaa is A or G
  MOD_RES (21)..(22)..(23)..(24): Xaa is A or G or is absent

SEQ ID NO: 82348 - protein, 38 aa, Artificial Sequence; identical to SEQ ID NO: 17494
  GFR-binding peptide
  MOD_RES (2)..(4): Xaa is C or S

SEQ ID NO: 82349 - protein, 41 aa, Artificial Sequence; identical to SEQ ID NO: 47002
  GFR-binding peptide
  MOD_RES (1)..(3)..(36)..(37): Xaa is C or S
  MOD_RES (14)..(15)..(16)..(17)..(18): Xaa is A or G
  MOD_RES (19)..(20)..(21)..(22): Xaa is A or G or is absent

SEQ ID NO: 82350 - protein, 34 aa, Artificial Sequence; identical to SEQ ID NO: 48294
  GFR-binding peptide
  MOD_RES (31)..(32): Xaa is C or S

SEQ ID NO: 82351 - protein, 44 aa, Artificial Sequence; identical to SEQ ID NO: 18331
  GFR-binding peptide
  MOD_RES (2)..(4)..(38): Xaa is C or S

SEQ ID NO: 82352 - protein, 38 aa, Artificial Sequence; identical to SEQ ID NO: 49598
  GFR-binding peptide
  MOD_RES (2)..(4)..(37)..(38): Xaa is C or S
  MOD_RES (15)..(16)..(17)..(18)..(19): Xaa is A or G
  MOD_RES (20)..(21)..(22)..(23): Xaa is A or G or is absent

SEQ ID NO: 82353 - protein, 39 aa, Artificial Sequence; identical to SEQ ID NO: 18332
  GFR-binding peptide
  MOD_RES (2)..(39): Xaa is C or S
  MOD_RES (15)..(16)..(17)..(18)..(19): Xaa is A or G
  MOD_RES (20)..(21)..(22)..(23): Xaa is A or G or is absent

SEQ ID NO: 82354 - protein, 32 aa, Artificial Sequence; identical to SEQ ID NO: 50836
  GFR-binding peptide
  MOD_RES (31)..(32): Xaa is C or S

SEQ ID NO: 82355 - protein, 39 aa, Artificial Sequence; identical to SEQ ID NO: 48297
  GFR-binding peptide
  MOD_RES (1)..(3)..(36)..(37): Xaa is C or S
  MOD_RES (14)..(15)..(16)..(17)..(18): Xaa is A or G
  MOD_RES (19)..(20)..(21)..(22): Xaa is A or G or is absent

SEQ ID NO: 82356 - protein, 39 aa, Artificial Sequence; identical to SEQ ID NO: 17498
  GFR-binding peptide
  MOD_RES (34)..(34): Xaa is C or S

SEQ ID NO: 82357 - protein, 34 aa, Artificial Sequence; identical to SEQ ID NO: 50838
  GFR-binding peptide
  MOD_RES (2)..(4): Xaa is C or S

SEQ ID NO: 82358 - protein, 41 aa, Artificial Sequence; identical to SEQ ID NO: 17499
  GFR-binding peptide
  MOD_RES (2)..(36): Xaa is C or S
  MOD_RES (14)..(15)..(16)..(17)..(18): Xaa is A or G
  MOD_RES (19)..(20)..(21)..(22): Xaa is A or G or is absent

SEQ ID NO: 82359 - protein, 36 aa, Artificial Sequence; identical to SEQ ID NO: 18334
  GFR-binding peptide
  MOD_RES (1)..(1): Xaa is C or S
  MOD_RES (14)..(15)..(16)..(17)..(18): Xaa is A or G
  MOD_RES (19)..(20)..(21)..(22): Xaa is A or G or is absent

SEQ ID NO: 82360 - protein, 37 aa, Artificial Sequence; identical to SEQ ID NO: 47017
  GFR-binding peptide
  MOD_RES (2)..(35)..(36): Xaa is C or S
  MOD_RES (13)..(14)..(15)..(16)..(17): Xaa is A or G
  MOD_RES (18)..(19)..(20)..(21): Xaa is A or G or is absent

SEQ ID NO: 82361 - protein, 38 aa, Artificial Sequence; identical to SEQ ID NO: 18335
  GFR-binding peptide
  MOD_RES (2)..(36): Xaa is C or S
  MOD_RES (14)..(15)..(16)..(17)..(18): Xaa is A or G
  MOD_RES (19)..(20)..(21)..(22): Xaa is A or G or is absent

SEQ ID NO: 82362 - protein, 43 aa, Artificial Sequence; identical to SEQ ID NO: 18336
  GFR-binding peptide
  MOD_RES (1)..(3)..(40): Xaa is C or S
  MOD_RES (16)..(17)..(18)..(19)..(20): Xaa is A or G
  MOD_RES (21)..(22)..(23)..(24): Xaa is A or G or is absent

SEQ ID NO: 82363 - protein, 38 aa, Artificial Sequence; identical to SEQ ID NO: 18337
  GFR-binding peptide
  MOD_RES (1)..(35): Xaa is C or S
  MOD_RES (13)..(14)..(15)..(16)..(17): Xaa is A or G
  MOD_RES (18)..(19)..(20)..(21): Xaa is A or G or is absent

SEQ ID NO: 82364 - protein, 34 aa, Artificial Sequence; identical to SEQ ID NO: 48310
  GFR-binding peptide
  MOD_RES (1)..(32)..(33): Xaa is C or S

SEQ ID NO: 82365 - protein, 33 aa, Artificial Sequence; identical to SEQ ID NO: 17505
  GFR-binding peptide

SEQ ID NO: 82366 - protein, 35 aa, Artificial Sequence; identical to SEQ ID NO: 47020
  GFR-binding peptide
  MOD_RES (1)..(3)..(34)..(35): Xaa is C or S

SEQ ID NO: 82367 - protein, 34 aa, Artificial Sequence; identical to SEQ ID NO: 18339
  GFR-binding peptide
  MOD_RES (33)..(33): Xaa is C or S

SEQ ID NO: 82368 - protein, 38 aa, Artificial Sequence; identical to SEQ ID NO: 17510
  GFR-binding peptide
  MOD_RES (34)..(34): Xaa is C or S
  MOD_RES (12)..(13)..(14)..(15)..(16): Xaa is A or G
  MOD_RES (17)..(18)..(19)..(20): Xaa is A or G or is absent

SEQ ID NO: 82369 - protein, 38 aa, Artificial Sequence; identical to SEQ ID NO: 18342
  GFR-binding peptide
  MOD_RES (1)..(3): Xaa is C or S

SEQ ID NO: 82370 - protein, 36 aa, Artificial Sequence; identical to SEQ ID NO: 48320
  GFR-binding peptide
  MOD_RES (1)..(32)..(33): Xaa is C or S

SEQ ID NO: 82371 - protein, 35 aa, Artificial Sequence; identical to SEQ ID NO: 47031
  GFR-binding peptide
  MOD_RES (1)..(3)..(34)..(35): Xaa is C or S

SEQ ID NO: 82372 - protein, 32 aa, Artificial Sequence; identical to SEQ ID NO: 17512
  GFR-binding peptide
  MOD_RES (11)..(12)..(13)..(14)..(15): Xaa is A or G
  MOD_RES (16)..(17)..(18)..(19): Xaa is A or G or is absent

SEQ ID NO: 82373 - protein, 40 aa, Artificial Sequence; identical to SEQ ID NO: 17513
  GFR-binding peptide
  MOD_RES (1)..(35): Xaa is C or S
  MOD_RES (13)..(14)..(15)..(16)..(17): Xaa is A or G
  MOD_RES (18)..(19)..(20)..(21): Xaa is A or G or is absent

SEQ ID NO: 82374 - protein, 36 aa, Artificial Sequence; identical to SEQ ID NO: 18343
  GFR-binding peptide
  MOD_RES (35)..(35): Xaa is C or S
  MOD_RES (11)..(12)..(13)..(14)..(15): Xaa is A or G
  MOD_RES (16)..(17)..(18)..(19): Xaa is A or G or is absent

SEQ ID NO: 82375 - protein, 42 aa, Artificial Sequence; identical to SEQ ID NO: 18345
  GFR-binding peptide
  MOD_RES (1)..(3)..(37): Xaa is C or S
  MOD_RES (15)..(16)..(17)..(18)..(19): Xaa is A or G
  MOD_RES (20)..(21)..(22)..(23): Xaa is A or G or is absent

SEQ ID NO: 82376 - protein, 36 aa, Artificial Sequence; identical to SEQ ID NO: 48324
  GFR-binding peptide
  MOD_RES (2)..(4)..(35)..(36): Xaa is C or S

SEQ ID NO: 82377 - protein, 35 aa, Artificial Sequence; identical to SEQ ID NO: 17515
  GFR-binding peptide
  MOD_RES (1)..(35): Xaa is C or S

SEQ ID NO: 82378 - protein, 38 aa, Artificial Sequence; identical to SEQ ID NO: 18346
  GFR-binding peptide
  MOD_RES (34)..(34): Xaa is C or S

SEQ ID NO: 82379 - protein, 40 aa, Artificial Sequence; identical to SEQ ID NO: 17516
  GFR-binding peptide
  MOD_RES (1)..(35): Xaa is C or S
  MOD_RES (13)..(14)..(15)..(16)..(17): Xaa is A or G
  MOD_RES (18)..(19)..(20)..(21): Xaa is A or G or is absent

SEQ ID NO: 82380 - protein, 35 aa, Artificial Sequence; identical to SEQ ID NO: 18347
  GFR-binding peptide

SEQ ID NO: 82381 - protein, 38 aa, Artificial Sequence; identical to SEQ ID NO: 47035
  GFR-binding peptide
  MOD_RES (1)..(3)..(34)..(35): Xaa is C or S

SEQ ID NO: 82382 - protein, 37 aa, Artificial Sequence; identical to SEQ ID NO: 18348
  GFR-binding peptide
  MOD_RES (1)..(1): Xaa is C or S

SEQ ID NO: 82383 - protein, 40 aa, Artificial Sequence; identical to SEQ ID NO: 18349
  GFR-binding peptide
  MOD_RES (2)..(39): Xaa is C or S
  MOD_RES (15)..(16)..(17)..(18)..(19): Xaa is A or G
  MOD_RES (20)..(21)..(22)..(23): Xaa is A or G or is absent

SEQ ID NO: 82384 - protein, 35 aa, Artificial Sequence; identical to SEQ ID NO: 48326
  GFR-binding peptide
  MOD_RES (2)..(4)..(35): Xaa is C or S

SEQ ID NO: 82385 - protein, 43 aa, Artificial Sequence; identical to SEQ ID NO: 17518
  GFR-binding peptide
  MOD_RES (2)..(39): Xaa is C or S
  MOD_RES (15)..(16)..(17)..(18)..(19): Xaa is A or G
  MOD_RES (20)..(21)..(22)..(23): Xaa is A or G or is absent

SEQ ID NO: 82386 - protein, 42 aa, Artificial Sequence; identical to SEQ ID NO: 18350
  GFR-binding peptide
  MOD_RES (1)..(3)..(40): Xaa is C or S
  MOD_RES (16)..(17)..(18)..(19)..(20): Xaa is A or G
  MOD_RES (21)..(22)..(23)..(24): Xaa is A or G or is absent

SEQ ID NO: 82387 - protein, 37 aa, Artificial Sequence; identical to SEQ ID NO: 49630
  GFR-binding peptide
  MOD_RES (2)..(4)..(37): Xaa is C or S
  MOD_RES (15)..(16)..(17)..(18)..(19): Xaa is A or G
  MOD_RES (20)..(21)..(22)..(23): Xaa is A or G or is absent

SEQ ID NO: 82388 - protein, 41 aa, Artificial Sequence; identical to SEQ ID NO: 49631
  GFR-binding peptide
  MOD_RES (2)..(4)..(35)..(36): Xaa is C or S

SEQ ID NO: 82389 - protein, 44 aa, Artificial Sequence; identical to SEQ ID NO: 18351
  GFR-binding peptide
  MOD_RES (1)..(3)..(40): Xaa is C or S
  MOD_RES (16)..(17)..(18)..(19)..(20): Xaa is A or G
  MOD_RES (21)..(22)..(23)..(24): Xaa is A or G or is absent

SEQ ID NO: 82390 - protein, 34 aa, Artificial Sequence; identical to SEQ ID NO: 49633
  GFR-binding peptide
  MOD_RES (1)..(34): Xaa is C or S
  MOD_RES (12)..(13)..(14)..(15)..(16): Xaa is A or G
  MOD_RES (17)..(18)..(19)..(20): Xaa is A or G or is absent

SEQ ID NO: 82391 - protein, 34 aa, Artificial Sequence; identical to SEQ ID NO: 47039
  GFR-binding peptide
  MOD_RES (1)..(3)..(34): Xaa is C or S

SEQ ID NO: 82392 - protein, 33 aa, Artificial Sequence; identical to SEQ ID NO: 17521
  GFR-binding peptide
  MOD_RES (33)..(33): Xaa is C or S
  MOD_RES (11)..(12)..(13)..(14)..(15): Xaa is A or G
  MOD_RES (16)..(17)..(18)..(19): Xaa is A or G or is absent

SEQ ID NO: 82393 - protein, 34 aa, Artificial Sequence; identical to SEQ ID NO: 50866
  GFR-binding peptide
  MOD_RES (1)..(3)..(34): Xaa is C or S

SEQ ID NO: 82394 - protein, 33 aa, Artificial Sequence; identical to SEQ ID NO: 17523
  GFR-binding peptide
  MOD_RES (11)..(12)..(13)..(14)..(15): Xaa is A or G
  MOD_RES (16)..(17)..(18)..(19): Xaa is A or G or is absent

SEQ ID NO: 82395 - protein, 37 aa, Artificial Sequence; identical to SEQ ID NO: 17525
  GFR-binding peptide
  MOD_RES (33)..(33): Xaa is C or S

SEQ ID NO: 82396 - protein, 34 aa, Artificial Sequence; identical to SEQ ID NO: 50869
  GFR-binding peptide
  MOD_RES (1)..(34): Xaa is C or S
  MOD_RES (12)..(13)..(14)..(15)..(16): Xaa is A or G
  MOD_RES (17)..(18)..(19)..(20): Xaa is A or G or is absent

SEQ ID NO: 82397 - protein, 40 aa, Artificial Sequence; identical to SEQ ID NO: 17526
  GFR-binding peptide
  MOD_RES (2)..(4)..(38): Xaa is C or S
  MOD_RES (16)..(17)..(18)..(19)..(20): Xaa is A or G
  MOD_RES (21)..(22)..(23)..(24): Xaa is A or G or is absent

SEQ ID NO: 82398 - protein, 37 aa, Artificial Sequence; identical to SEQ ID NO: 17528
  GFR-binding peptide
  MOD_RES (37)..(37): Xaa is C or S

SEQ ID NO: 82399 - protein, 40 aa, Artificial Sequence; identical to SEQ ID NO: 49644
  GFR-binding peptide
  MOD_RES (1)..(34)..(35): Xaa is C or S
  MOD_RES (12)..(13)..(14)..(15)..(16): Xaa is A or G
  MOD_RES (17)..(18)..(19)..(20): Xaa is A or G or is absent

SEQ ID NO: 82400 - protein, 38 aa, Artificial Sequence; identical to SEQ ID NO: 18354
  GFR-binding peptide
  MOD_RES (33)..(33): Xaa is C or S
  MOD_RES (11)..(12)..(13)..(14)..(15): Xaa is A or G
  MOD_RES (16)..(17)..(18)..(19): Xaa is A or G or is absent

SEQ ID NO: 82401 - protein, 39 aa, Artificial Sequence; identical to SEQ ID NO: 18356
  GFR-binding peptide
  MOD_RES (2)..(4)..(38): Xaa is C or S
  MOD_RES (16)..(17)..(18)..(19)..(20): Xaa is A or G
  MOD_RES (21)..(22)..(23)..(24): Xaa is A or G or is absent

SEQ ID NO: 82402 - protein, 35 aa, Artificial Sequence; identical to SEQ ID NO: 18357
  GFR-binding peptide
  MOD_RES (33)..(33): Xaa is C or S
  MOD_RES (11)..(12)..(13)..(14)..(15): Xaa is A or G
  MOD_RES (16)..(17)..(18)..(19): Xaa is A or G or is absent

SEQ ID NO: 82403 - protein, 39 aa, Artificial Sequence; identical to SEQ ID NO: 47057
  GFR-binding peptide
  MOD_RES (33)..(34): Xaa is C or S
  MOD_RES (11)..(12)..(13)..(14)..(15): Xaa is A or G
  MOD_RES (16)..(17)..(18)..(19): Xaa is A or G or is absent

SEQ ID NO: 82404 - protein, 34 aa, Artificial Sequence; identical to SEQ ID NO: 18359
  GFR-binding peptide
  MOD_RES (34)..(34): Xaa is C or S

SEQ ID NO: 82405 - protein, 39 aa, Artificial Sequence; identical to SEQ ID NO: 18360
  GFR-binding peptide
  MOD_RES (37)..(37): Xaa is C or S

SEQ ID NO: 82406 - protein, 42 aa, Artificial Sequence; identical to SEQ ID NO: 17533
  GFR-binding peptide
  MOD_RES (2)..(39): Xaa is C or S
  MOD_RES (15)..(16)..(17)..(18)..(19): Xaa is A or G
  MOD_RES (20)..(21)..(22)..(23): Xaa is A or G or is absent

SEQ ID NO: 82407 - protein, 40 aa, Artificial Sequence; identical to SEQ ID NO: 18361
  GFR-binding peptide
  MOD_RES (1)..(38): Xaa is C or S

SEQ ID NO: 82408 - protein, 36 aa, Artificial Sequence; identical to SEQ ID NO: 17535
  GFR-binding peptide
  MOD_RES (33)..(33): Xaa is C or S

SEQ ID NO: 82409 - protein, 37 aa, Artificial Sequence; identical to SEQ ID NO: 17537
  GFR-binding peptide
  MOD_RES (36)..(36): Xaa is C or S

SEQ ID NO: 82410 - protein, 42 aa, Artificial Sequence; identical to SEQ ID NO: 18365
  GFR-binding peptide
  MOD_RES (1)..(3)..(40): Xaa is C or S
  MOD_RES (16)..(17)..(18)..(19)..(20): Xaa is A or G
  MOD_RES (21)..(22)..(23)..(24): Xaa is A or G or is absent

SEQ ID NO: 82411 - protein, 37 aa, Artificial Sequence; identical to SEQ ID NO: 18366
  GFR-binding peptide
  MOD_RES (1)..(1): Xaa is C or S

SEQ ID NO: 82412 - protein, 37 aa, Artificial Sequence; identical to SEQ ID NO: 17538
  GFR-binding peptide
  MOD_RES (1)..(1): Xaa is C or S

SEQ ID NO: 82413 - protein, 36 aa, Artificial Sequence; identical to SEQ ID NO: 18367
  GFR-binding peptide
  MOD_RES (2)..(36): Xaa is C or S

SEQ ID NO: 82414 - protein, 39 aa, Artificial Sequence; identical to SEQ ID NO: 18368
  GFR-binding peptide
  MOD_RES (2)..(39): Xaa is C or S
  MOD_RES (15)..(16)..(17)..(18)..(19): Xaa is A or G
  MOD_RES (20)..(21)..(22)..(23): Xaa is A or G or is absent

SEQ ID NO: 82415 - protein, 40 aa, Artificial Sequence; identical to SEQ ID NO: 47074
  GFR-binding peptide
  MOD_RES (2)..(4)..(35)..(36): Xaa is C or S

SEQ ID NO: 82416 - protein, 35 aa, Artificial Sequence; identical to SEQ ID NO: 18369
  GFR-binding peptide
  MOD_RES (34)..(34): Xaa is C or S
  MOD_RES (12)..(13)..(14)..(15)..(16): Xaa is A or G
  MOD_RES (17)..(18)..(19)..(20): Xaa is A or G or is absent

SEQ ID NO: 82417 - protein, 40 aa, Artificial Sequence; identical to SEQ ID NO: 18372
  GFR-binding peptide
  MOD_RES (1)..(38): Xaa is C or S

SEQ ID NO: 82418 - protein, 37 aa, Artificial Sequence; identical to SEQ ID NO: 17540
  GFR-binding peptide
  MOD_RES (1)..(3)..(37): Xaa is C or S

SEQ ID NO: 82419 - protein, 39 aa, Artificial Sequence; identical to SEQ ID NO: 49662
  GFR-binding peptide
  MOD_RES (2)..(4)..(37)..(38): Xaa is C or S
  MOD_RES (15)..(16)..(17)..(18)..(19): Xaa is A or G
  MOD_RES (20)..(21)..(22)..(23): Xaa is A or G or is absent

SEQ ID NO: 82420 - protein, 33 aa, Artificial Sequence; identical to SEQ ID NO: 50881
  GFR-binding peptide
  MOD_RES (1)..(1): Xaa is C or S
  MOD_RES (12)..(13)..(14)..(15)..(16): Xaa is A or G
  MOD_RES (17)..(18)..(19)..(20): Xaa is A or G or is absent

SEQ ID NO: 82421 - protein, 35 aa, Artificial Sequence; identical to SEQ ID NO: 49664
  GFR-binding peptide
  MOD_RES (2)..(4)..(35): Xaa is C or S

SEQ ID NO: 82422 - protein, 38 aa, Artificial Sequence; identical to SEQ ID NO: 49666
  GFR-binding peptide
  MOD_RES (33)..(34): Xaa is C or S
  MOD_RES (11)..(12)..(13)..(14)..(15): Xaa is A or G
  MOD_RES (16)..(17)..(18)..(19): Xaa is A or G or is absent

SEQ ID NO: 82423 - protein, 36 aa, Artificial Sequence; identical to SEQ ID NO: 18373
  GFR-binding peptide
  MOD_RES (35)..(35): Xaa is C or S

SEQ ID NO: 82424 - protein, 36 aa, Artificial Sequence; identical to SEQ ID NO: 49671
  GFR-binding peptide
  MOD_RES (1)..(3)..(36): Xaa is C or S
  MOD_RES (14)..(15)..(16)..(17)..(18): Xaa is A or G
  MOD_RES (19)..(20)..(21)..(22): Xaa is A or G or is absent

SEQ ID NO: 82425 - protein, 33 aa, Artificial Sequence; identical to SEQ ID NO: 50887
  GFR-binding peptide
  MOD_RES (1)..(3): Xaa is C or S

SEQ ID NO: 82426 - protein, 37 aa, Artificial Sequence; identical to SEQ ID NO: 48368
  GFR-binding peptide
  MOD_RES (2)..(4)..(37): Xaa is C or S
  MOD_RES (15)..(16)..(17)..(18)..(19): Xaa is A or G
  MOD_RES (20)..(21)..(22)..(23): Xaa is A or G or is absent

SEQ ID NO: 82427 - protein, 43 aa, Artificial Sequence; identical to SEQ ID NO: 18377
  GFR-binding peptide
  MOD_RES (1)..(3)..(37): Xaa is C or S

SEQ ID NO: 82428 - protein, 36 aa, Artificial Sequence; identical to SEQ ID NO: 17545
  GFR-binding peptide
  MOD_RES (33)..(33): Xaa is C or S

SEQ ID NO: 82429 - protein, 44 aa, Artificial Sequence; identical to SEQ ID NO: 18380
  GFR-binding peptide
  MOD_RES (2)..(4)..(38): Xaa is C or S
  MOD_RES (16)..(17)..(18)..(19)..(20): Xaa is A or G
  MOD_RES (21)..(22)..(23)..(24): Xaa is A or G or is absent

SEQ ID NO: 82430 - protein, 40 aa, Artificial Sequence; identical to SEQ ID NO: 48369
  GFR-binding peptide
  MOD_RES (1)..(3)..(34)..(35): Xaa is C or S

SEQ ID NO: 82431 - protein, 37 aa, Artificial Sequence; identical to SEQ ID NO: 48370
  GFR-binding peptide
  MOD_RES (1)..(3)..(36)..(37): Xaa is C or S
  MOD_RES (14)..(15)..(16)..(17)..(18): Xaa is A or G
  MOD_RES (19)..(20)..(21)..(22): Xaa is A or G or is absent

SEQ ID NO: 82432 - protein, 36 aa, Artificial Sequence; identical to SEQ ID NO: 47088
  GFR-binding peptide
  MOD_RES (1)..(32)..(33): Xaa is C or S

SEQ ID NO: 82433 - protein, 37 aa, Artificial Sequence; identical to SEQ ID NO: 18382
  GFR-binding peptide
  MOD_RES (37)..(37): Xaa is C or S

SEQ ID NO: 82434 - protein, 33 aa, Artificial Sequence; identical to SEQ ID NO: 18383
  GFR-binding peptide

SEQ ID NO: 82435 - protein, 34 aa, Artificial Sequence; identical to SEQ ID NO: 49676
  GFR-binding peptide
  MOD_RES (2)..(4): Xaa is C or S

SEQ ID NO: 82436 - protein, 35 aa, Artificial Sequence; identical to SEQ ID NO: 17547
  GFR-binding peptide
  MOD_RES (2)..(2): Xaa is C or S
  MOD_RES (14)..(15)..(16)..(17)..(18): Xaa is A or G
  MOD_RES (19)..(20)..(21)..(22): Xaa is A or G or is absent

SEQ ID NO: 82437 - protein, 33 aa, Artificial Sequence; identical to SEQ ID NO: 48375
  GFR-binding peptide
  MOD_RES (33)..(33): Xaa is C or S
  MOD_RES (11)..(12)..(13)..(14)..(15): Xaa is A or G
  MOD_RES (16)..(17)..(18)..(19): Xaa is A or G or is absent

SEQ ID NO: 82438 - protein, 31 aa, Artificial Sequence; identical to SEQ ID NO: 49680
  GFR-binding peptide
  MOD_RES (1)..(1): Xaa is C or S

SEQ ID NO: 82439 - protein, 34 aa, Artificial Sequence; identical to SEQ ID NO: 18387
  GFR-binding peptide
  MOD_RES (13)..(14)..(15)..(16)..(17): Xaa is A or G
  MOD_RES (18)..(19)..(20)..(21): Xaa is A or G or is absent

SEQ ID NO: 82440 - protein, 33 aa, Artificial Sequence; identical to SEQ ID NO: 18388
  GFR-binding peptide

SEQ ID NO: 82441 - protein, 43 aa, Artificial Sequence; identical to SEQ ID NO: 17553
  GFR-binding peptide
  MOD_RES (2)..(39): Xaa is C or S

SEQ ID NO: 82442 - protein, 44 aa, Artificial Sequence; identical to SEQ ID NO: 18390
  GFR-binding peptide
  MOD_RES (2)..(4)..(41): Xaa is C or S

SEQ ID NO: 82443 - protein, 37 aa, Artificial Sequence; identical to SEQ ID NO: 17554
  GFR-binding peptide
  MOD_RES (34)..(34): Xaa is C or S

SEQ ID NO: 82444 - protein, 31 aa, Artificial Sequence; identical to SEQ ID NO: 48387
  GFR-binding peptide
  MOD_RES (31)..(31): Xaa is C or S

SEQ ID NO: 82445 - protein, 37 aa, Artificial Sequence; identical to SEQ ID NO: 17555
  GFR-binding peptide
  MOD_RES (1)..(3)..(37): Xaa is C or S

SEQ ID NO: 82446 - protein, 40 aa, Artificial Sequence; identical to SEQ ID NO: 48388
  GFR-binding peptide
  MOD_RES (2)..(4)..(37)..(38): Xaa is C or S
  MOD_RES (15)..(16)..(17)..(18)..(19): Xaa is A or G
  MOD_RES (20)..(21)..(22)..(23): Xaa is A or G or is absent

SEQ ID NO: 82447 - protein, 43 aa, Artificial Sequence; identical to SEQ ID NO: 18394
  GFR-binding peptide
  MOD_RES (1)..(3)..(40): Xaa is C or S
  MOD_RES (16)..(17)..(18)..(19)..(20): Xaa is A or G
  MOD_RES (21)..(22)..(23)..(24): Xaa is A or G or is absent

SEQ ID NO: 82448 - protein, 41 aa, Artificial Sequence; identical to SEQ ID NO: 17558
  GFR-binding peptide
  MOD_RES (37)..(37): Xaa is C or S

SEQ ID NO: 82449 - protein, 41 aa, Artificial Sequence; identical to SEQ ID NO: 18395
  GFR-binding peptide
  MOD_RES (1)..(3)..(37): Xaa is C or S
  MOD_RES (15)..(16)..(17)..(18)..(19): Xaa is A or G
  MOD_RES (20)..(21)..(22)..(23): Xaa is A or G or is absent

SEQ ID NO: 82450 - protein, 38 aa, Artificial Sequence; identical to SEQ ID NO: 48389
  GFR-binding peptide
  MOD_RES (2)..(35)..(36): Xaa is C or S
  MOD_RES (13)..(14)..(15)..(16)..(17): Xaa is A or G
  MOD_RES (18)..(19)..(20)..(21): Xaa is A or G or is absent

SEQ ID NO: 82451 - protein, 35 aa, Artificial Sequence; identical to SEQ ID NO: 17561
  GFR-binding peptide
  MOD_RES (1)..(35): Xaa is C or S
  MOD_RES (13)..(14)..(15)..(16)..(17): Xaa is A or G
  MOD_RES (18)..(19)..(20)..(21): Xaa is A or G or is absent

SEQ ID NO: 82452 - protein, 44 aa, Artificial Sequence; identical to SEQ ID NO: 17562
  GFR-binding peptide
  MOD_RES (2)..(4)..(38): Xaa is C or S

SEQ ID NO: 82453 - protein, 33 aa, Artificial Sequence; identical to SEQ ID NO: 49696
  GFR-binding peptide
  MOD_RES (1)..(3): Xaa is C or S

SEQ ID NO: 82454 - protein, 39 aa, Artificial Sequence; identical to SEQ ID NO: 17564
  GFR-binding peptide
  MOD_RES (2)..(4)..(38): Xaa is C or S
  MOD_RES (16)..(17)..(18)..(19)..(20): Xaa is A or G
  MOD_RES (21)..(22)..(23)..(24): Xaa is A or G or is absent

SEQ ID NO: 82455 - protein, 36 aa, Artificial Sequence; identical to SEQ ID NO: 17565
  GFR-binding peptide
  MOD_RES (2)..(2): Xaa is C or S
  MOD_RES (15)..(16)..(17)..(18)..(19): Xaa is A or G
  MOD_RES (20)..(21)..(22)..(23): Xaa is A or G or is absent

SEQ ID NO: 82456 - protein, 40 aa, Artificial Sequence; identical to SEQ ID NO: 18399
  GFR-binding peptide
  MOD_RES (34)..(34): Xaa is C or S

SEQ ID NO: 82457 - protein, 35 aa, Artificial Sequence; identical to SEQ ID NO: 48396
  GFR-binding peptide
  MOD_RES (1)..(3): Xaa is C or S
  MOD_RES (14)..(15)..(16)..(17)..(18): Xaa is A or G
  MOD_RES (19)..(20)..(21)..(22): Xaa is A or G or is absent

SEQ ID NO: 82458 - protein, 35 aa, Artificial Sequence; identical to SEQ ID NO: 18400
  GFR-binding peptide

SEQ ID NO: 82459 - protein, 39 aa, Artificial Sequence; identical to SEQ ID NO: 18401
  GFR-binding peptide
  MOD_RES (35)..(35): Xaa is C or S

SEQ ID NO: 82460 - protein, 35 aa, Artificial Sequence; identical to SEQ ID NO: 17568
  GFR-binding peptide
  MOD_RES (1)..(35): Xaa is C or S

SEQ ID NO: 82461 - protein, 43 aa, Artificial Sequence; identical to SEQ ID NO: 47116
  GFR-binding peptide
  MOD_RES (2)..(4)..(37)..(38): Xaa is C or S
  MOD_RES (15)..(16)..(17)..(18)..(19): Xaa is A or G
  MOD_RES (20)..(21)..(22)..(23): Xaa is A or G or is absent

SEQ ID NO: 82462 - protein, 42 aa, Artificial Sequence; identical to SEQ ID NO: 18402
  GFR-binding peptide
  MOD_RES (1)..(3)..(40): Xaa is C or S

SEQ ID NO: 82463 - protein, 37 aa, Artificial Sequence; identical to SEQ ID NO: 17569
  GFR-binding peptide
  MOD_RES (1)..(1): Xaa is C or S

SEQ ID NO: 82464 - protein, 45 aa, Artificial Sequence; identical to SEQ ID NO: 17570
  GFR-binding peptide
  MOD_RES (2)..(4)..(41): Xaa is C or S

SEQ ID NO: 82465 - protein, 33 aa, Artificial Sequence; identical to SEQ ID NO: 47121
  GFR-binding peptide
  MOD_RES (1)..(3): Xaa is C or S

SEQ ID NO: 82466 - protein, 37 aa, Artificial Sequence; identical to SEQ ID NO: 18403
  GFR-binding peptide
  MOD_RES (2)..(2): Xaa is C or S
  MOD_RES (15)..(16)..(17)..(18)..(19): Xaa is A or G
  MOD_RES (20)..(21)..(22)..(23): Xaa is A or G or is absent

SEQ ID NO: 82467 - protein, 36 aa, Artificial Sequence; identical to SEQ ID NO: 18404
  GFR-binding peptide

SEQ ID NO: 82468 - protein, 40 aa, Artificial Sequence; identical to SEQ ID NO: 17572
  GFR-binding peptide
  MOD_RES (1)..(38): Xaa is C or S
  MOD_RES (14)..(15)..(16)..(17)..(18): Xaa is A or G
  MOD_RES (19)..(20)..(21)..(22): Xaa is A or G or is absent

SEQ ID NO: 82469 - protein, 35 aa, Artificial Sequence; identical to SEQ ID NO: 18408
  GFR-binding peptide
  MOD_RES (33)..(33): Xaa is C or S
  MOD_RES (11)..(12)..(13)..(14)..(15): Xaa is A or G
  MOD_RES (16)..(17)..(18)..(19): Xaa is A or G or is absent

SEQ ID NO: 82470 - protein, 34 aa, Artificial Sequence; identical to SEQ ID NO: 18410
  GFR-binding peptide
  MOD_RES (13)..(14)..(15)..(16)..(17): Xaa is A or G
  MOD_RES (18)..(19)..(20)..(21): Xaa is A or G or is absent

SEQ ID NO: 82471 - protein, 39 aa, Artificial Sequence; identical to SEQ ID NO: 48407
  GFR-binding peptide
  MOD_RES (2)..(4)..(35)..(36): Xaa is C or S

SEQ ID NO: 82472 - protein, 40 aa, Artificial Sequence; identical to SEQ ID NO: 17573
  GFR-binding peptide
  MOD_RES (1)..(3)..(40): Xaa is C or S

SEQ ID NO: 82473 - protein, 38 aa, Artificial Sequence; identical to SEQ ID NO: 18411
  GFR-binding peptide
  MOD_RES (36)..(36): Xaa is C or S
  MOD_RES (12)..(13)..(14)..(15)..(16): Xaa is A or G
  MOD_RES (17)..(18)..(19)..(20): Xaa is A or G or is absent

SEQ ID NO: 82474 - protein, 38 aa, Artificial Sequence; identical to SEQ ID NO: 50927
  GFR-binding peptide
  MOD_RES (2)..(4)..(37)..(38): Xaa is C or S
  MOD_RES (15)..(16)..(17)..(18)..(19): Xaa is A or G
  MOD_RES (20)..(21)..(22)..(23): Xaa is A or G or is absent

SEQ ID NO: 82475 - protein, 31 aa, Artificial Sequence; identical to SEQ ID NO: 47127
  GFR-binding peptide
  MOD_RES (1)..(1): Xaa is C or S

SEQ ID NO: 82476 - protein, 39 aa, Artificial Sequence; identical to SEQ ID NO: 48413
  GFR-binding peptide
  MOD_RES (1)..(34)..(35): Xaa is C or S
  MOD_RES (12)..(13)..(14)..(15)..(16): Xaa is A or G
  MOD_RES (17)..(18)..(19)..(20): Xaa is A or G or is absent

SEQ ID NO: 82477 - protein, 36 aa, Artificial Sequence; identical to SEQ ID NO: 17575
  GFR-binding peptide
  MOD_RES (34)..(34): Xaa is C or S
  MOD_RES (12)..(13)..(14)..(15)..(16): Xaa is A or G
  MOD_RES (17)..(18)..(19)..(20): Xaa is A or G or is absent

SEQ ID NO: 82478 - protein, 33 aa, Artificial Sequence; identical to SEQ ID NO: 17576
  GFR-binding peptide
  MOD_RES (33)..(33): Xaa is C or S
  MOD_RES (11)..(12)..(13)..(14)..(15): Xaa is A or G
  MOD_RES (16)..(17)..(18)..(19): Xaa is A or G or is absent

SEQ ID NO: 82479 - protein, 37 aa, Artificial Sequence; identical to SEQ ID NO: 47129
  GFR-binding peptide
  MOD_RES (1)..(32)..(33): Xaa is C or S

SEQ ID NO: 82480 - protein, 41 aa, Artificial Sequence; identical to SEQ ID NO: 47131
  GFR-binding peptide
  MOD_RES (2)..(4)..(35)..(36): Xaa is C or S

SEQ ID NO: 82481 - protein, 40 aa, Artificial Sequence; identical to SEQ ID NO: 50928
  GFR-binding peptide
  MOD_RES (1)..(34)..(35): Xaa is C or S
  MOD_RES (12)..(13)..(14)..(15)..(16): Xaa is A or G
  MOD_RES (17)..(18)..(19)..(20): Xaa is A or G or is absent

SEQ ID NO: 82482 - protein, 45 aa, Artificial Sequence; identical to SEQ ID NO: 17577
  GFR-binding peptide
  MOD_RES (2)..(4)..(41): Xaa is C or S
  MOD_RES (17)..(18)..(19)..(20)..(21): Xaa is A or G
  MOD_RES (22)..(23)..(24)..(25): Xaa is A or G or is absent

SEQ ID NO: 82483 - protein, 38 aa, Artificial Sequence; identical to SEQ ID NO: 18412
  GFR-binding peptide
  MOD_RES (36)..(36): Xaa is C or S

SEQ ID NO: 82484 - protein, 40 aa, Artificial Sequence; identical to SEQ ID NO: 18413
  GFR-binding peptide
  MOD_RES (2)..(4): Xaa is C or S
  MOD_RES (17)..(18)..(19)..(20)..(21): Xaa is A or G
  MOD_RES (22)..(23)..(24)..(25): Xaa is A or G or is absent

SEQ ID NO: 82485 - protein, 44 aa, Artificial Sequence; identical to SEQ ID NO: 18414
  GFR-binding peptide
  MOD_RES (1)..(3)..(40): Xaa is C or S
  MOD_RES (16)..(17)..(18)..(19)..(20): Xaa is A or G
  MOD_RES (21)..(22)..(23)..(24): Xaa is A or G or is absent

SEQ ID NO: 82486 - protein, 34 aa, Artificial Sequence; identical to SEQ ID NO: 50936
  GFR-binding peptide
  MOD_RES (33)..(34): Xaa is C or S
  MOD_RES (11)..(12)..(13)..(14)..(15): Xaa is A or G
  MOD_RES (16)..(17)..(18)..(19): Xaa is A or G or is absent

SEQ ID NO: 82487 - protein, 38 aa, Artificial Sequence; identical to SEQ ID NO: 17581
  GFR-binding peptide
  MOD_RES (2)..(2): Xaa is C or S
  MOD_RES (15)..(16)..(17)..(18)..(19): Xaa is A or G
  MOD_RES (20)..(21)..(22)..(23): Xaa is A or G or is absent

SEQ ID NO: 82488 - protein, 40 aa, Artificial Sequence; identical to SEQ ID NO: 18417
  GFR-binding peptide
  MOD_RES (2)..(39): Xaa is C or S

SEQ ID NO: 82489 - protein, 42 aa, Artificial Sequence; identical to SEQ ID NO: 49719
  GFR-binding peptide
  MOD_RES (2)..(4)..(37)..(38): Xaa is C or S
  MOD_RES (15)..(16)..(17)..(18)..(19): Xaa is A or G
  MOD_RES (20)..(21)..(22)..(23): Xaa is A or G or is absent

SEQ ID NO: 82490 - protein, 37 aa, Artificial Sequence; identical to SEQ ID NO: 48424
  GFR-binding peptide
  MOD_RES (2)..(4)..(35)..(36): Xaa is C or S

SEQ ID NO: 82491 - protein, 36 aa, Artificial Sequence; identical to SEQ ID NO: 48428
  GFR-binding peptide
  MOD_RES (1)..(34)..(35): Xaa is C or S
  MOD_RES (12)..(13)..(14)..(15)..(16): Xaa is A or G
  MOD_RES (17)..(18)..(19)..(20): Xaa is A or G or is absent

SEQ ID NO: 82492 - protein, 35 aa, Artificial Sequence; identical to SEQ ID NO: 47145
  GFR-binding peptide
  MOD_RES (2)..(35): Xaa is C or S
  MOD_RES (13)..(14)..(15)..(16)..(17): Xaa is A or G
  MOD_RES (18)..(19)..(20)..(21): Xaa is A or G or is absent

SEQ ID NO: 82493 - protein, 37 aa, Artificial Sequence; identical to SEQ ID NO: 17582
  GFR-binding peptide
  MOD_RES (36)..(36): Xaa is C or S
  MOD_RES (12)..(13)..(14)..(15)..(16): Xaa is A or G
  MOD_RES (17)..(18)..(19)..(20): Xaa is A or G or is absent

SEQ ID NO: 82494 - protein, 38 aa, Artificial Sequence; identical to SEQ ID NO: 17584
  GFR-binding peptide
  MOD_RES (37)..(37): Xaa is C or S
  MOD_RES (13)..(14)..(15)..(16)..(17): Xaa is A or G
  MOD_RES (18)..(19)..(20)..(21): Xaa is A or G or is absent

SEQ ID NO: 82495 - protein, 38 aa, Artificial Sequence; identical to SEQ ID NO: 17585
  GFR-binding peptide
  MOD_RES (35)..(35): Xaa is C or S

SEQ ID NO: 82496 - protein, 37 aa, Artificial Sequence; identical to SEQ ID NO: 18421
  GFR-binding peptide
  MOD_RES (1)..(3)..(37): Xaa is C or S
  MOD_RES (15)..(16)..(17)..(18)..(19): Xaa is A or G
  MOD_RES (20)..(21)..(22)..(23): Xaa is A or G or is absent

SEQ ID NO: 82497 - protein, 43 aa, Artificial Sequence; identical to SEQ ID NO: 18422
  GFR-binding peptide
  MOD_RES (2)..(4)..(41): Xaa is C or S

SEQ ID NO: 82498 - protein, 40 aa, Artificial Sequence; identical to SEQ ID NO: 17589
  GFR-binding peptide
  MOD_RES (2)..(4)..(38): Xaa is C or S

SEQ ID NO: 82499 - protein, 38 aa, Artificial Sequence; identical to SEQ ID NO: 47160
  GFR-binding peptide
  MOD_RES (1)..(34)..(35): Xaa is C or S
  MOD_RES (12)..(13)..(14)..(15)..(16): Xaa is A or G
  MOD_RES (17)..(18)..(19)..(20): Xaa is A or G or is absent

SEQ ID NO: 82500 - protein, 41 aa, Artificial Sequence; identical to SEQ ID NO: 17592
  GFR-binding peptide
  MOD_RES (1)..(38): Xaa is C or S
  MOD_RES (14)..(15)..(16)..(17)..(18): Xaa is A or G
  MOD_RES (19)..(20)..(21)..(22): Xaa is A or G or is absent

SEQ ID NO: 82501 - protein, 35 aa, Artificial Sequence; identical to SEQ ID NO: 50950
  GFR-binding peptide
  MOD_RES (1)..(32)..(33): Xaa is C or S

SEQ ID NO: 82502 - protein, 37 aa, Artificial Sequence; identical to SEQ ID NO: 50951
  GFR-binding peptide
  MOD_RES (1)..(3)..(34)..(35): Xaa is C or S

SEQ ID NO: 82503 - protein, 38 aa, Artificial Sequence; identical to SEQ ID NO: 18423
  GFR-binding peptide
  MOD_RES (33)..(33): Xaa is C or S
  MOD_RES (11)..(12)..(13)..(14)..(15): Xaa is A or G
  MOD_RES (16)..(17)..(18)..(19): Xaa is A or G or is absent

SEQ ID NO: 82504 - protein, 37 aa, Artificial Sequence; identical to SEQ ID NO: 48436
  GFR-binding peptide
  MOD_RES (1)..(3)..(36)..(37): Xaa is C or S
  MOD_RES (14)..(15)..(16)..(17)..(18): Xaa is A or G
  MOD_RES (19)..(20)..(21)..(22): Xaa is A or G or is absent

SEQ ID NO: 82505 - protein, 33 aa, Artificial Sequence; identical to SEQ ID NO: 47163
  GFR-binding peptide
  MOD_RES (1)..(32)..(33): Xaa is C or S

SEQ ID NO: 82506 - protein, 41 aa, Artificial Sequence; identical to SEQ ID NO: 18426
  GFR-binding peptide
  MOD_RES (1)..(3)..(37): Xaa is C or S
  MOD_RES (15)..(16)..(17)..(18)..(19): Xaa is A or G
  MOD_RES (20)..(21)..(22)..(23): Xaa is A or G or is absent

SEQ ID NO: 82507 - protein, 41 aa, Artificial Sequence; identical to SEQ ID NO: 18427
  GFR-binding peptide
  MOD_RES (2)..(4)..(38): Xaa is C or S

SEQ ID NO: 82508 - protein, 36 aa, Artificial Sequence; identical to SEQ ID NO: 17593
  GFR-binding peptide
  MOD_RES (1)..(1): Xaa is C or S

SEQ ID NO: 82509 - protein, 32 aa, Artificial Sequence; identical to SEQ ID NO: 47165
  GFR-binding peptide
  MOD_RES (2)..(2): Xaa is C or S

SEQ ID NO: 82510 - protein, 40 aa, Artificial Sequence; identical to SEQ ID NO: 17594
  GFR-binding peptide
  MOD_RES (2)..(36): Xaa is C or S
  MOD_RES (14)..(15)..(16)..(17)..(18): Xaa is A or G
  MOD_RES (19)..(20)..(21)..(22): Xaa is A or G or is absent

SEQ ID NO: 82511 - protein, 39 aa, Artificial Sequence; identical to SEQ ID NO: 17595
  GFR-binding peptide
  MOD_RES (2)..(4): Xaa is C or S

SEQ ID NO: 82512 - protein, 38 aa, Artificial Sequence; identical to SEQ ID NO: 18428
  GFR-binding peptide
  MOD_RES (1)..(3)..(37): Xaa is C or S
  MOD_RES (15)..(16)..(17)..(18)..(19): Xaa is A or G
  MOD_RES (20)..(21)..(22)..(23): Xaa is A or G or is absent

SEQ ID NO: 82513 - protein, 37 aa, Artificial Sequence; identical to SEQ ID NO: 18430
  GFR-binding peptide
  MOD_RES (2)..(2): Xaa is C or S
  MOD_RES (15)..(16)..(17)..(18)..(19): Xaa is A or G
  MOD_RES (20)..(21)..(22)..(23): Xaa is A or G or is absent

SEQ ID NO: 82514 - protein, 35 aa, Artificial Sequence; identical to SEQ ID NO: 17596
  GFR-binding peptide
  MOD_RES (1)..(1): Xaa is C or S

SEQ ID NO: 82515 - protein, 34 aa, Artificial Sequence; identical to SEQ ID NO: 50963
  GFR-binding peptide
  MOD_RES (33)..(34): Xaa is C or S
  MOD_RES (11)..(12)..(13)..(14)..(15): Xaa is A or G
  MOD_RES (16)..(17)..(18)..(19): Xaa is A or G or is absent

SEQ ID NO: 82516 - protein, 36 aa, Artificial Sequence; identical to SEQ ID NO: 18432
  GFR-binding peptide
  MOD_RES (34)..(34): Xaa is C or S

SEQ ID NO: 82517 - protein, 39 aa, Artificial Sequence; identical to SEQ ID NO: 18433
  GFR-binding peptide
  MOD_RES (2)..(36): Xaa is C or S

SEQ ID NO: 82518 - protein, 42 aa, Artificial Sequence; identical to SEQ ID NO: 17598
  GFR-binding peptide
  MOD_RES (2)..(4)..(38): Xaa is C or S

SEQ ID NO: 82519 - protein, 39 aa, Artificial Sequence; identical to SEQ ID NO: 17599
  GFR-binding peptide
  MOD_RES (1)..(38): Xaa is C or S

SEQ ID NO: 82520 - protein, 35 aa, Artificial Sequence; identical to SEQ ID NO: 18435
  GFR-binding peptide
  MOD_RES (33)..(33): Xaa is C or S
  MOD_RES (11)..(12)..(13)..(14)..(15): Xaa is A or G
  MOD_RES (16)..(17)..(18)..(19): Xaa is A or G or is absent

SEQ ID NO: 82521 - protein, 37 aa, Artificial Sequence; identical to SEQ ID NO: 18436
  GFR-binding peptide
  MOD_RES (35)..(35): Xaa is C or S

SEQ ID NO: 82522 - protein, 33 aa, Artificial Sequence; identical to SEQ ID NO: 49747
  GFR-binding peptide
  MOD_RES (1)..(1): Xaa is C or S
  MOD_RES (12)..(13)..(14)..(15)..(16): Xaa is A or G
  MOD_RES (17)..(18)..(19)..(20): Xaa is A or G or is absent

SEQ ID NO: 82523 - protein, 37 aa, Artificial Sequence; identical to SEQ ID NO: 47170
  GFR-binding peptide
  MOD_RES (1)..(3)..(34)..(35): Xaa is C or S

SEQ ID NO: 82524 - protein, 40 aa, Artificial Sequence; identical to SEQ ID NO: 18439
  GFR-binding peptide
  MOD_RES (2)..(4)..(38): Xaa is C or S

SEQ ID NO: 82525 - protein, 43 aa, Artificial Sequence; identical to SEQ ID NO: 17605
  GFR-binding peptide
  MOD_RES (1)..(3)..(37): Xaa is C or S

SEQ ID NO: 82526 - protein, 33 aa, Artificial Sequence; identical to SEQ ID NO: 50980
  GFR-binding peptide
  MOD_RES (31)..(32): Xaa is C or S

SEQ ID NO: 82527 - protein, 40 aa, Artificial Sequence; identical to SEQ ID NO: 18441
  GFR-binding peptide
  MOD_RES (1)..(3)..(40): Xaa is C or S
  MOD_RES (16)..(17)..(18)..(19)..(20): Xaa is A or G
  MOD_RES (21)..(22)..(23)..(24): Xaa is A or G or is absent

SEQ ID NO: 82528 - protein, 40 aa, Artificial Sequence; identical to SEQ ID NO: 18442
  GFR-binding peptide
  MOD_RES (37)..(37): Xaa is C or S
  MOD_RES (13)..(14)..(15)..(16)..(17): Xaa is A or G
  MOD_RES (18)..(19)..(20)..(21): Xaa is A or G or is absent

SEQ ID NO: 82529 - protein, 38 aa, Artificial Sequence; identical to SEQ ID NO: 18443
  GFR-binding peptide
  MOD_RES (2)..(36): Xaa is C or S
  MOD_RES (14)..(15)..(16)..(17)..(18): Xaa is A or G
  MOD_RES (19)..(20)..(21)..(22): Xaa is A or G or is absent

SEQ ID NO: 82530 - protein, 38 aa, Artificial Sequence; identical to SEQ ID NO: 18444
  GFR-binding peptide
  MOD_RES (1)..(38): Xaa is C or S
  MOD_RES (14)..(15)..(16)..(17)..(18): Xaa is A or G
  MOD_RES (19)..(20)..(21)..(22): Xaa is A or G or is absent

SEQ ID NO: 82531 - protein, 36 aa, Artificial Sequence; identical to SEQ ID NO: 18445
  GFR-binding peptide
  MOD_RES (1)..(35): Xaa is C or S

SEQ ID NO: 82532 - protein, 33 aa, Artificial Sequence; identical to SEQ ID NO: 50989
  GFR-binding peptide
  MOD_RES (2)..(33): Xaa is C or S

SEQ ID NO: 82533 - protein, 35 aa, Artificial Sequence; identical to SEQ ID NO: 18446
  GFR-binding peptide
  MOD_RES (13)..(14)..(15)..(16)..(17): Xaa is A or G
  MOD_RES (18)..(19)..(20)..(21): Xaa is A or G or is absent

SEQ ID NO: 82534 - protein, 37 aa, Artificial Sequence; identical to SEQ ID NO: 18447
  GFR-binding peptide
  MOD_RES (37)..(37): Xaa is C or S
  MOD_RES (13)..(14)..(15)..(16)..(17): Xaa is A or G
  MOD_RES (18)..(19)..(20)..(21): Xaa is A or G or is absent

SEQ ID NO: 82535 - protein, 40 aa, Artificial Sequence; identical to SEQ ID NO: 18448
  GFR-binding peptide
  MOD_RES (1)..(3)..(40): Xaa is C or S

SEQ ID NO: 82536 - protein, 37 aa, Artificial Sequence; identical to SEQ ID NO: 49761
  GFR-binding peptide
  MOD_RES (2)..(4)..(37): Xaa is C or S
  MOD_RES (15)..(16)..(17)..(18)..(19): Xaa is A or G
  MOD_RES (20)..(21)..(22)..(23): Xaa is A or G or is absent

SEQ ID NO: 82537 - protein, 33 aa, Artificial Sequence; identical to SEQ ID NO: 48468
  GFR-binding peptide
  MOD_RES (2)..(33): Xaa is C or S

SEQ ID NO: 82538 - protein, 40 aa, Artificial Sequence; identical to SEQ ID NO: 47183
  GFR-binding peptide
  MOD_RES (2)..(4)..(37)..(38): Xaa is C or S
  MOD_RES (15)..(16)..(17)..(18)..(19): Xaa is A or G
  MOD_RES (20)..(21)..(22)..(23): Xaa is A or G or is absent

SEQ ID NO: 82539 - protein, 37 aa, Artificial Sequence; identical to SEQ ID NO: 48470
  GFR-binding peptide
  MOD_RES (2)..(35)..(36): Xaa is C or S
  MOD_RES (13)..(14)..(15)..(16)..(17): Xaa is A or G
  MOD_RES (18)..(19)..(20)..(21): Xaa is A or G or is absent

SEQ ID NO: 82540 - protein, 37 aa, Artificial Sequence; identical to SEQ ID NO: 17612
  GFR-binding peptide
  MOD_RES (2)..(36): Xaa is C or S

SEQ ID NO: 82541 - protein, 37 aa, Artificial Sequence; identical to SEQ ID NO: 17613
  GFR-binding peptide
  MOD_RES (36)..(36): Xaa is C or S
  MOD_RES (12)..(13)..(14)..(15)..(16): Xaa is A or G
  MOD_RES (17)..(18)..(19)..(20): Xaa is A or G or is absent

SEQ ID NO: 82542 - protein, 36 aa, Artificial Sequence; identical to SEQ ID NO: 17614
  GFR-binding peptide
  MOD_RES (33)..(33): Xaa is C or S
  MOD_RES (11)..(12)..(13)..(14)..(15): Xaa is A or G
  MOD_RES (16)..(17)..(18)..(19): Xaa is A or G or is absent

SEQ ID NO: 82543 - protein, 39 aa, Artificial Sequence; identical to SEQ ID NO: 47190
  GFR-binding peptide
  MOD_RES (1)..(34)..(35): Xaa is C or S
  MOD_RES (12)..(13)..(14)..(15)..(16): Xaa is A or G
  MOD_RES (17)..(18)..(19)..(20): Xaa is A or G or is absent

SEQ ID NO: 82544 - protein, 37 aa, Artificial Sequence; identical to SEQ ID NO: 18450
  GFR-binding peptide
  MOD_RES (34)..(34): Xaa is C or S

SEQ ID NO: 82545 - protein, 39 aa, Artificial Sequence; identical to SEQ ID NO: 51000
  GFR-binding peptide
  MOD_RES (2)..(4)..(37)..(38): Xaa is C or S
  MOD_RES (15)..(16)..(17)..(18)..(19): Xaa is A or G
  MOD_RES (20)..(21)..(22)..(23): Xaa is A or G or is absent

SEQ ID NO: 82546 - protein, 40 aa, Artificial Sequence; identical to SEQ ID NO: 18451
  GFR-binding peptide
  MOD_RES (34)..(34): Xaa is C or S

SEQ ID NO: 82547 - protein, 40 aa, Artificial Sequence; identical to SEQ ID NO: 17615
  GFR-binding peptide
  MOD_RES (36)..(36): Xaa is C or S
  MOD_RES (12)..(13)..(14)..(15)..(16): Xaa is A or G
  MOD_RES (17)..(18)..(19)..(20): Xaa is A or G or is absent

SEQ ID NO: 82548 - protein, 37 aa, Artificial Sequence; identical to SEQ ID NO: 18452
  GFR-binding peptide
  MOD_RES (1)..(3)..(37): Xaa is C or S

SEQ ID NO: 82549 - protein, 32 aa, Artificial Sequence; identical to SEQ ID NO: 47199
  GFR-binding peptide
  MOD_RES (1)..(32): Xaa is C or S

SEQ ID NO: 82550 - protein, 34 aa, Artificial Sequence; identical to SEQ ID NO: 18454
  GFR-binding peptide
  MOD_RES (33)..(33): Xaa is C or S

SEQ ID NO: 82551 - protein, 36 aa, Artificial Sequence; identical to SEQ ID NO: 51013
  GFR-binding peptide
  MOD_RES (31)..(32): Xaa is C or S

SEQ ID NO: 82552 - protein, 40 aa, Artificial Sequence; identical to SEQ ID NO: 17617
  GFR-binding peptide
  MOD_RES (37)..(37): Xaa is C or S
  MOD_RES (13)..(14)..(15)..(16)..(17): Xaa is A or G
  MOD_RES (18)..(19)..(20)..(21): Xaa is A or G or is absent

SEQ ID NO: 82553 - protein, 31 aa, Artificial Sequence; identical to SEQ ID NO: 48483
  GFR-binding peptide
  MOD_RES (31)..(31): Xaa is C or S

SEQ ID NO: 82554 - protein, 41 aa, Artificial Sequence; identical to SEQ ID NO: 17619
  GFR-binding peptide
  MOD_RES (1)..(3)..(40): Xaa is C or S

SEQ ID NO: 82555 - protein, 36 aa, Artificial Sequence; identical to SEQ ID NO: 48485
  GFR-binding peptide
  MOD_RES (2)..(35)..(36): Xaa is C or S
  MOD_RES (13)..(14)..(15)..(16)..(17): Xaa is A or G
  MOD_RES (18)..(19)..(20)..(21): Xaa is A or G or is absent

SEQ ID NO: 82556 - protein, 32 aa, Artificial Sequence; identical to SEQ ID NO: 48487
  GFR-binding peptide
  MOD_RES (11)..(12)..(13)..(14)..(15): Xaa is A or G
  MOD_RES (16)..(17)..(18)..(19): Xaa is A or G or is absent

SEQ ID NO: 82557 - protein, 38 aa, Artificial Sequence; identical to SEQ ID NO: 51015
  GFR-binding peptide
  MOD_RES (1)..(3)..(34)..(35): Xaa is C or S

SEQ ID NO: 82558 - protein, 34 aa, Artificial Sequence; identical to SEQ ID NO: 18458
  GFR-binding peptide

SEQ ID NO: 82559 - protein, 38 aa, Artificial Sequence; identical to SEQ ID NO: 49772
  GFR-binding peptide
  MOD_RES (2)..(4)..(37)..(38): Xaa is C or S
  MOD_RES (15)..(16)..(17)..(18)..(19): Xaa is A or G
  MOD_RES (20)..(21)..(22)..(23): Xaa is A or G or is absent

SEQ ID NO: 82560 - protein, 41 aa, Artificial Sequence; identical to SEQ ID NO: 18459
  GFR-binding peptide
  MOD_RES (2)..(4)..(41): Xaa is C or S

SEQ ID NO: 82561 - protein, 38 aa, Artificial Sequence; identical to SEQ ID NO: 17623
  GFR-binding peptide
  MOD_RES (2)..(4): Xaa is C or S

SEQ ID NO: 82562 - protein, 32 aa, Artificial Sequence; identical to SEQ ID NO: 49776
  GFR-binding peptide
  MOD_RES (2)..(2): Xaa is C or S

SEQ ID NO: 82563 - protein, 38 aa, Artificial Sequence; identical to SEQ ID NO: 47207
  GFR-binding peptide
  MOD_RES (2)..(35)..(36): Xaa is C or S
  MOD_RES (13)..(14)..(15)..(16)..(17): Xaa is A or G
  MOD_RES (18)..(19)..(20)..(21): Xaa is A or G or is absent

SEQ ID NO: 82564 - protein, 37 aa, Artificial Sequence; identical to SEQ ID NO: 18461
  GFR-binding peptide
  MOD_RES (1)..(3)..(37): Xaa is C or S
  MOD_RES (15)..(16)..(17)..(18)..(19): Xaa is A or G
  MOD_RES (20)..(21)..(22)..(23): Xaa is A or G or is absent

SEQ ID NO: 82565 - protein, 38 aa, Artificial Sequence; identical to SEQ ID NO: 48495
  GFR-binding peptide
  MOD_RES (1)..(34)..(35): Xaa is C or S
  MOD_RES (12)..(13)..(14)..(15)..(16): Xaa is A or G
  MOD_RES (17)..(18)..(19)..(20): Xaa is A or G or is absent

SEQ ID NO: 82566 - protein, 43 aa, Artificial Sequence; identical to SEQ ID NO: 17627
  GFR-binding peptide
  MOD_RES (2)..(39): Xaa is C or S
  MOD_RES (15)..(16)..(17)..(18)..(19): Xaa is A or G
  MOD_RES (20)..(21)..(22)..(23): Xaa is A or G or is absent

SEQ ID NO: 82567 - protein, 33 aa, Artificial Sequence; identical to SEQ ID NO: 51025
  GFR-binding peptide
  MOD_RES (2)..(33): Xaa is C or S

SEQ ID NO: 82568 - protein, 37 aa, Artificial Sequence; identical to SEQ ID NO: 49784
  GFR-binding peptide
  MOD_RES (31)..(32): Xaa is C or S

SEQ ID NO: 82569 - protein, 38 aa, Artificial Sequence; identical to SEQ ID NO: 17633
  GFR-binding peptide
  MOD_RES (2)..(2): Xaa is C or S
  MOD_RES (15)..(16)..(17)..(18)..(19): Xaa is A or G
  MOD_RES (20)..(21)..(22)..(23): Xaa is A or G or is absent

SEQ ID NO: 82570 - protein, 41 aa, Artificial Sequence; identical to SEQ ID NO: 17634
  GFR-binding peptide
  MOD_RES (1)..(35): Xaa is C or S

SEQ ID NO: 82571 - protein, 38 aa, Artificial Sequence; identical to SEQ ID NO: 18469
  GFR-binding peptide
  MOD_RES (37)..(37): Xaa is C or S

SEQ ID NO: 82572 - protein, 39 aa, Artificial Sequence; identical to SEQ ID NO: 47220
  GFR-binding peptide
  MOD_RES (1)..(3)..(34)..(35): Xaa is C or S

SEQ ID NO: 82573 - protein, 41 aa, Artificial Sequence; identical to SEQ ID NO: 17635
  GFR-binding peptide
  MOD_RES (2)..(4)..(41): Xaa is C or S
  MOD_RES (17)..(18)..(19)..(20)..(21): Xaa is A or G
  MOD_RES (22)..(23)..(24)..(25): Xaa is A or G or is absent

SEQ ID NO: 82574 - protein, 36 aa, Artificial Sequence; identical to SEQ ID NO: 49788
  GFR-binding peptide
  MOD_RES (31)..(32): Xaa is C or S

SEQ ID NO: 82575 - protein, 37 aa, Artificial Sequence; identical to SEQ ID NO: 51030
  GFR-binding peptide
  MOD_RES (2)..(4)..(37): Xaa is C or S
  MOD_RES (15)..(16)..(17)..(18)..(19): Xaa is A or G
  MOD_RES (20)..(21)..(22)..(23): Xaa is A or G or is absent

SEQ ID NO: 82576 - protein, 36 aa, Artificial Sequence; identical to SEQ ID NO: 17639
  GFR-binding peptide
  MOD_RES (34)..(34): Xaa is C or S

SEQ ID NO: 82577 - protein, 33 aa, Artificial Sequence; identical to SEQ ID NO: 17640
  GFR-binding peptide
  MOD_RES (33)..(33): Xaa is C or S

SEQ ID NO: 82578 - protein, 38 aa, Artificial Sequence; identical to SEQ ID NO: 48510
  GFR-binding peptide
  MOD_RES (2)..(35)..(36): Xaa is C or S
  MOD_RES (13)..(14)..(15)..(16)..(17): Xaa is A or G
  MOD_RES (18)..(19)..(20)..(21): Xaa is A or G or is absent

SEQ ID NO: 82579 - protein, 34 aa, Artificial Sequence; identical to SEQ ID NO: 49793
  GFR-binding peptide
  MOD_RES (1)..(32)..(33): Xaa is C or S

SEQ ID NO: 82580 - protein, 38 aa, Artificial Sequence; identical to SEQ ID NO: 51035
  GFR-binding peptide
  MOD_RES (1)..(3)..(36)..(37): Xaa is C or S
  MOD_RES (14)..(15)..(16)..(17)..(18): Xaa is A or G
  MOD_RES (19)..(20)..(21)..(22): Xaa is A or G or is absent

SEQ ID NO: 82581 - protein, 34 aa, Artificial Sequence; identical to SEQ ID NO: 49794
  GFR-binding peptide
  MOD_RES (1)..(3)..(34): Xaa is C or S

SEQ ID NO: 82582 - protein, 45 aa, Artificial Sequence; identical to SEQ ID NO: 17644
  GFR-binding peptide
  MOD_RES (2)..(4)..(41): Xaa is C or S
  MOD_RES (17)..(18)..(19)..(20)..(21): Xaa is A or G
  MOD_RES (22)..(23)..(24)..(25): Xaa is A or G or is absent

SEQ ID NO: 82583 - protein, 33 aa, Artificial Sequence; identical to SEQ ID NO: 18473
  GFR-binding peptide
  MOD_RES (12)..(13)..(14)..(15)..(16): Xaa is A or G
  MOD_RES (17)..(18)..(19)..(20): Xaa is A or G or is absent

SEQ ID NO: 82584 - protein, 33 aa, Artificial Sequence; identical to SEQ ID NO: 17650
  GFR-binding peptide
  MOD_RES (33)..(33): Xaa is C or S

SEQ ID NO: 82585 - protein, 41 aa, Artificial Sequence; identical to SEQ ID NO: 17652
  GFR-binding peptide
  MOD_RES (1)..(35): Xaa is C or S
  MOD_RES (13)..(14)..(15)..(16)..(17): Xaa is A or G
  MOD_RES (18)..(19)..(20)..(21): Xaa is A or G or is absent

SEQ ID NO: 82586 - protein, 37 aa, Artificial Sequence; identical to SEQ ID NO: 18476
  GFR-binding peptide
  MOD_RES (1)..(3): Xaa is C or S
  MOD_RES (16)..(17)..(18)..(19)..(20): Xaa is A or G
  MOD_RES (21)..(22)..(23)..(24): Xaa is A or G or is absent

SEQ ID NO: 82587 - protein, 43 aa, Artificial Sequence; identical to SEQ ID NO: 17654
  GFR-binding peptide
  MOD_RES (2)..(4)..(41): Xaa is C or S
  MOD_RES (17)..(18)..(19)..(20)..(21): Xaa is A or G
  MOD_RES (22)..(23)..(24)..(25): Xaa is A or G or is absent

SEQ ID NO: 82588 - protein, 39 aa, Artificial Sequence; identical to SEQ ID NO: 47234
  GFR-binding peptide
  MOD_RES (33)..(34): Xaa is C or S
  MOD_RES (11)..(12)..(13)..(14)..(15): Xaa is A or G
  MOD_RES (16)..(17)..(18)..(19): Xaa is A or G or is absent

SEQ ID NO: 82589 - protein, 42 aa, Artificial Sequence; identical to SEQ ID NO: 17655
  GFR-binding peptide
  MOD_RES (2)..(4)..(38): Xaa is C or S
  MOD_RES (16)..(17)..(18)..(19)..(20): Xaa is A or G
  MOD_RES (21)..(22)..(23)..(24): Xaa is A or G or is absent

SEQ ID NO: 82590 - protein, 42 aa, Artificial Sequence; identical to SEQ ID NO: 18479
  GFR-binding peptide
  MOD_RES (1)..(38): Xaa is C or S
  MOD_RES (14)..(15)..(16)..(17)..(18): Xaa is A or G
  MOD_RES (19)..(20)..(21)..(22): Xaa is A or G or is absent

SEQ ID NO: 82591 - protein, 38 aa, Artificial Sequence; identical to SEQ ID NO: 47238
  GFR-binding peptide
  MOD_RES (33)..(34): Xaa is C or S
  MOD_RES (11)..(12)..(13)..(14)..(15): Xaa is A or G
  MOD_RES (16)..(17)..(18)..(19): Xaa is A or G or is absent

SEQ ID NO: 82592 - protein, 38 aa, Artificial Sequence; identical to SEQ ID NO: 49806
  GFR-binding peptide
  MOD_RES (2)..(33)..(34): Xaa is C or S

SEQ ID NO: 82593 - protein, 35 aa, Artificial Sequence; identical to SEQ ID NO: 17658
  GFR-binding peptide
  MOD_RES (2)..(2): Xaa is C or S

SEQ ID NO: 82594 - protein, 39 aa, Artificial Sequence; identical to SEQ ID NO: 18480
  GFR-binding peptide
  MOD_RES (2)..(39): Xaa is C or S

SEQ ID NO: 82595 - protein, 36 aa, Artificial Sequence; identical to SEQ ID NO: 17659
  GFR-binding peptide
  MOD_RES (2)..(2): Xaa is C or S
  MOD_RES (15)..(16)..(17)..(18)..(19): Xaa is A or G
  MOD_RES (20)..(21)..(22)..(23): Xaa is A or G or is absent

SEQ ID NO: 82596 - protein, 38 aa, Artificial Sequence; identical to SEQ ID NO: 47241
  GFR-binding peptide
  MOD_RES (2)..(4)..(35)..(36): Xaa is C or S

SEQ ID NO: 82597 - protein, 38 aa, Artificial Sequence; identical to SEQ ID NO: 49811
  GFR-binding peptide
  MOD_RES (2)..(33)..(34): Xaa is C or S

SEQ ID NO: 82598 - protein, 42 aa, Artificial Sequence; identical to SEQ ID NO: 17661
  GFR-binding peptide
  MOD_RES (2)..(4)..(38): Xaa is C or S
  MOD_RES (16)..(17)..(18)..(19)..(20): Xaa is A or G
  MOD_RES (21)..(22)..(23)..(24): Xaa is A or G or is absent

SEQ ID NO: 82599 - protein, 32 aa, Artificial Sequence; identical to SEQ ID NO: 17663
  GFR-binding peptide

SEQ ID NO: 82600 - protein, 38 aa, Artificial Sequence; identical to SEQ ID NO: 17664
  GFR-binding peptide
  MOD_RES (1)..(35): Xaa is C or S
  MOD_RES (13)..(14)..(15)..(16)..(17): Xaa is A or G
  MOD_RES (18)..(19)..(20)..(21): Xaa is A or G or is absent

SEQ ID NO: 82601 - protein, 43 aa, Artificial Sequence; identical to SEQ ID NO: 18487
  GFR-binding peptide
  MOD_RES (1)..(3)..(37): Xaa is C or S

SEQ ID NO: 82602 - protein, 40 aa, Artificial Sequence; identical to SEQ ID NO: 18489
  GFR-binding peptide
  MOD_RES (1)..(35): Xaa is C or S
  MOD_RES (13)..(14)..(15)..(16)..(17): Xaa is A or G
  MOD_RES (18)..(19)..(20)..(21): Xaa is A or G or is absent

SEQ ID NO: 82603 - protein, 37 aa, Artificial Sequence; identical to SEQ ID NO: 18490
  GFR-binding peptide
  MOD_RES (2)..(2): Xaa is C or S

SEQ ID NO: 82604 - protein, 41 aa, Artificial Sequence; identical to SEQ ID NO: 17666
  GFR-binding peptide
  MOD_RES (2)..(4)..(41): Xaa is C or S

SEQ ID NO: 82605 - protein, 42 aa, Artificial Sequence; identical to SEQ ID NO: 17667
  GFR-binding peptide
  MOD_RES (1)..(3)..(37): Xaa is C or S

SEQ ID NO: 82606 - protein, 38 aa, Artificial Sequence; identical to SEQ ID NO: 18491
  GFR-binding peptide
  MOD_RES (35)..(35): Xaa is C or S
  MOD_RES (11)..(12)..(13)..(14)..(15): Xaa is A or G
  MOD_RES (16)..(17)..(18)..(19): Xaa is A or G or is absent

SEQ ID NO: 82607 - protein, 37 aa, Artificial Sequence; identical to SEQ ID NO: 18492
  GFR-binding peptide
  MOD_RES (34)..(34): Xaa is C or S
  MOD_RES (12)..(13)..(14)..(15)..(16): Xaa is A or G
  MOD_RES (17)..(18)..(19)..(20): Xaa is A or G or is absent

SEQ ID NO: 82608 - protein, 36 aa, Artificial Sequence; identical to SEQ ID NO: 51059
  GFR-binding peptide
  MOD_RES (33)..(34): Xaa is C or S
  MOD_RES (11)..(12)..(13)..(14)..(15): Xaa is A or G
  MOD_RES (16)..(17)..(18)..(19): Xaa is A or G or is absent

SEQ ID NO: 82609 - protein, 43 aa, Artificial Sequence; identical to SEQ ID NO: 18493
  GFR-binding peptide
  MOD_RES (2)..(39): Xaa is C or S
  MOD_RES (15)..(16)..(17)..(18)..(19): Xaa is A or G
  MOD_RES (20)..(21)..(22)..(23): Xaa is A or G or is absent

SEQ ID NO: 82610 - protein, 37 aa, Artificial Sequence; identical to SEQ ID NO: 18494
  GFR-binding peptide
  MOD_RES (1)..(3): Xaa is C or S
  MOD_RES (16)..(17)..(18)..(19)..(20): Xaa is A or G
  MOD_RES (21)..(22)..(23)..(24): Xaa is A or G or is absent

SEQ ID NO: 82611 - protein, 32 aa, Artificial Sequence; identical to SEQ ID NO: 17668
  GFR-binding peptide
  MOD_RES (11)..(12)..(13)..(14)..(15): Xaa is A or G
  MOD_RES (16)..(17)..(18)..(19): Xaa is A or G or is absent

SEQ ID NO: 82612 - protein, 33 aa, Artificial Sequence; identical to SEQ ID NO: 17669
  GFR-binding peptide

SEQ ID NO: 82613 - protein, 42 aa, Artificial Sequence; identical to SEQ ID NO: 17670
  GFR-binding peptide
  MOD_RES (2)..(4)..(41): Xaa is C or S

SEQ ID NO: 82614 - protein, 37 aa, Artificial Sequence; identical to SEQ ID NO: 18495
  GFR-binding peptide
  MOD_RES (1)..(3): Xaa is C or S
  MOD_RES (16)..(17)..(18)..(19)..(20): Xaa is A or G
  MOD_RES (21)..(22)..(23)..(24): Xaa is A or G or is absent

SEQ ID NO: 82615 - protein, 38 aa, Artificial Sequence; identical to SEQ ID NO: 47264
  GFR-binding peptide
  MOD_RES (33)..(34): Xaa is C or S
  MOD_RES (11)..(12)..(13)..(14)..(15): Xaa is A or G
  MOD_RES (16)..(17)..(18)..(19): Xaa is A or G or is absent

SEQ ID NO: 82616 - protein, 35 aa, Artificial Sequence; identical to SEQ ID NO: 47267
  GFR-binding peptide
  MOD_RES (31)..(32): Xaa is C or S

SEQ ID NO: 82617 - protein, 39 aa, Artificial Sequence; identical to SEQ ID NO: 17673
  GFR-binding peptide
  MOD_RES (34)..(34): Xaa is C or S

SEQ ID NO: 82618 - protein, 39 aa, Artificial Sequence; identical to SEQ ID NO: 17674
  GFR-binding peptide
  MOD_RES (37)..(37): Xaa is C or S
  MOD_RES (13)..(14)..(15)..(16)..(17): Xaa is A or G
  MOD_RES (18)..(19)..(20)..(21): Xaa is A or G or is absent

SEQ ID NO: 82619 - protein, 36 aa, Artificial Sequence; identical to SEQ ID NO: 49830
  GFR-binding peptide
  MOD_RES (31)..(32): Xaa is C or S

SEQ ID NO: 82620 - protein, 36 aa, Artificial Sequence; identical to SEQ ID NO: 47274
  GFR-binding peptide
  MOD_RES (1)..(34)..(35): Xaa is C or S
  MOD_RES (12)..(13)..(14)..(15)..(16): Xaa is A or G
  MOD_RES (17)..(18)..(19)..(20): Xaa is A or G or is absent

SEQ ID NO: 82621 - protein, 38 aa, Artificial Sequence; identical to SEQ ID NO: 47276
  GFR-binding peptide
  MOD_RES (1)..(32)..(33): Xaa is C or S

SEQ ID NO: 82622 - protein, 36 aa, Artificial Sequence; identical to SEQ ID NO: 17678
  GFR-binding peptide

SEQ ID NO: 82623 - protein, 37 aa, Artificial Sequence; identical to SEQ ID NO: 49832
  GFR-binding peptide
  MOD_RES (1)..(32)..(33): Xaa is C or S

SEQ ID NO: 82624 - protein, 40 aa, Artificial Sequence; identical to SEQ ID NO: 17680
  GFR-binding peptide
  MOD_RES (2)..(39): Xaa is C or S
  MOD_RES (15)..(16)..(17)..(18)..(19): Xaa is A or G
  MOD_RES (20)..(21)..(22)..(23): Xaa is A or G or is absent

SEQ ID NO: 82625 - protein, 37 aa, Artificial Sequence; identical to SEQ ID NO: 17681
  GFR-binding peptide
  MOD_RES (2)..(4): Xaa is C or S
  MOD_RES (16)..(17)..(18)..(19)..(20): Xaa is A or G
  MOD_RES (21)..(22)..(23)..(24): Xaa is A or G or is absent

SEQ ID NO: 82626 - protein, 34 aa, Artificial Sequence; identical to SEQ ID NO: 47284
  GFR-binding peptide
  MOD_RES (2)..(4): Xaa is C or S

SEQ ID NO: 82627 - protein, 38 aa, Artificial Sequence; identical to SEQ ID NO: 18500
  GFR-binding peptide
  MOD_RES (36)..(36): Xaa is C or S

SEQ ID NO: 82628 - protein, 34 aa, Artificial Sequence; identical to SEQ ID NO: 17688
  GFR-binding peptide
  MOD_RES (34)..(34): Xaa is C or S

SEQ ID NO: 82629 - protein, 34 aa, Artificial Sequence; identical to SEQ ID NO: 47290
  GFR-binding peptide
  MOD_RES (1)..(34): Xaa is C or S
  MOD_RES (12)..(13)..(14)..(15)..(16): Xaa is A or G
  MOD_RES (17)..(18)..(19)..(20): Xaa is A or G or is absent

SEQ ID NO: 82630 - protein, 35 aa, Artificial Sequence; identical to SEQ ID NO: 18504
  GFR-binding peptide
  MOD_RES (13)..(14)..(15)..(16)..(17): Xaa is A or G
  MOD_RES (18)..(19)..(20)..(21): Xaa is A or G or is absent

SEQ ID NO: 82631 - protein, 39 aa, Artificial Sequence; identical to SEQ ID NO: 17689
  GFR-binding peptide
  MOD_RES (2)..(4): Xaa is C or S

SEQ ID NO: 82632 - protein, 40 aa, Artificial Sequence; identical to SEQ ID NO: 18507
  GFR-binding peptide
  MOD_RES (2)..(4): Xaa is C or S

SEQ ID NO: 82633 - protein, 34 aa, Artificial Sequence; identical to SEQ ID NO: 18508
  GFR-binding peptide
  MOD_RES (12)..(13)..(14)..(15)..(16): Xaa is A or G
  MOD_RES (17)..(18)..(19)..(20): Xaa is A or G or is absent

SEQ ID NO: 82634 - protein, 36 aa, Artificial Sequence; identical to SEQ ID NO: 47300
  GFR-binding peptide
  MOD_RES (1)..(3)..(36): Xaa is C or S
  MOD_RES (14)..(15)..(16)..(17)..(18): Xaa is A or G
  MOD_RES (19)..(20)..(21)..(22): Xaa is A or G or is absent

SEQ ID NO: 82635 - protein, 35 aa, Artificial Sequence; identical to SEQ ID NO: 18509
  GFR-binding peptide
  MOD_RES (12)..(13)..(14)..(15)..(16): Xaa is A or G
  MOD_RES (17)..(18)..(19)..(20): Xaa is A or G or is absent

SEQ ID NO: 82636 - protein, 38 aa, Artificial Sequence; identical to SEQ ID NO: 17691
  GFR-binding peptide
  MOD_RES (2)..(4): Xaa is C or S

SEQ ID NO: 82637 - protein, 39 aa, Artificial Sequence; identical to SEQ ID NO: 18511
  GFR-binding peptide
  MOD_RES (2)..(4): Xaa is C or S
  MOD_RES (17)..(18)..(19)..(20)..(21): Xaa is A or G
  MOD_RES (22)..(23)..(24)..(25): Xaa is A or G or is absent

SEQ ID NO: 82638 - protein, 40 aa, Artificial Sequence; identical to SEQ ID NO: 47302
  GFR-binding peptide
  MOD_RES (1)..(3)..(34)..(35): Xaa is C or S

SEQ ID NO: 82639 - protein, 40 aa, Artificial Sequence; identical to SEQ ID NO: 48572
  GFR-binding peptide
  MOD_RES (2)..(35)..(36): Xaa is C or S
  MOD_RES (13)..(14)..(15)..(16)..(17): Xaa is A or G
  MOD_RES (18)..(19)..(20)..(21): Xaa is A or G or is absent

SEQ ID NO: 82640 - protein, 34 aa, Artificial Sequence; identical to SEQ ID NO: 17692
  GFR-binding peptide
  MOD_RES (12)..(13)..(14)..(15)..(16): Xaa is A or G
  MOD_RES (17)..(18)..(19)..(20): Xaa is A or G or is absent

SEQ ID NO: 82641 - protein, 34 aa, Artificial Sequence; identical to SEQ ID NO: 18514
  GFR-binding peptide
  MOD_RES (33)..(33): Xaa is C or S
  MOD_RES (11)..(12)..(13)..(14)..(15): Xaa is A or G
  MOD_RES (16)..(17)..(18)..(19): Xaa is A or G or is absent

SEQ ID NO: 82642 - protein, 33 aa, Artificial Sequence; identical to SEQ ID NO: 18515
  GFR-binding peptide

SEQ ID NO: 82643 - protein, 42 aa, Artificial Sequence; identical to SEQ ID NO: 18516
  GFR-binding peptide
  MOD_RES (1)..(3)..(37): Xaa is C or S
  MOD_RES (15)..(16)..(17)..(18)..(19): Xaa is A or G
  MOD_RES (20)..(21)..(22)..(23): Xaa is A or G or is absent

SEQ ID NO: 82644 - protein, 41 aa, Artificial Sequence; identical to SEQ ID NO: 51102
  GFR-binding peptide
  MOD_RES (2)..(35)..(36): Xaa is C or S
  MOD_RES (13)..(14)..(15)..(16)..(17): Xaa is A or G
  MOD_RES (18)..(19)..(20)..(21): Xaa is A or G or is absent

SEQ ID NO: 82645 - protein, 38 aa, Artificial Sequence; identical to SEQ ID NO: 18519
  GFR-binding peptide
  MOD_RES (1)..(3): Xaa is C or S
  MOD_RES (16)..(17)..(18)..(19)..(20): Xaa is A or G
  MOD_RES (21)..(22)..(23)..(24): Xaa is A or G or is absent

SEQ ID NO: 82646 - protein, 33 aa, Artificial Sequence; identical to SEQ ID NO: 17695
  GFR-binding peptide
  MOD_RES (33)..(33): Xaa is C or S

SEQ ID NO: 82647 - protein, 37 aa, Artificial Sequence; identical to SEQ ID NO: 49864
  GFR-binding peptide
  MOD_RES (2)..(33)..(34): Xaa is C or S

SEQ ID NO: 82648 - protein, 35 aa, Artificial Sequence; identical to SEQ ID NO: 18521
  GFR-binding peptide
  MOD_RES (1)..(1): Xaa is C or S

SEQ ID NO: 82649 - protein, 38 aa, Artificial Sequence; identical to SEQ ID NO: 18522
  GFR-binding peptide
  MOD_RES (34)..(34): Xaa is C or S

SEQ ID NO: 82650 - protein, 36 aa, Artificial Sequence; identical to SEQ ID NO: 18523
  GFR-binding peptide
  MOD_RES (1)..(1): Xaa is C or S

SEQ ID NO: 82651 - protein, 36 aa, Artificial Sequence; identical to SEQ ID NO: 49867
  GFR-binding peptide
  MOD_RES (2)..(4): Xaa is C or S
  MOD_RES (15)..(16)..(17)..(18)..(19): Xaa is A or G
  MOD_RES (20)..(21)..(22)..(23): Xaa is A or G or is absent

SEQ ID NO: 82652 - protein, 41 aa, Artificial Sequence; identical to SEQ ID NO: 17697
  GFR-binding peptide
  MOD_RES (2)..(4)..(38): Xaa is C or S

SEQ ID NO: 82653 - protein, 42 aa, Artificial Sequence; identical to SEQ ID NO: 48601
  GFR-binding peptide
  MOD_RES (1)..(3)..(36)..(37): Xaa is C or S
  MOD_RES (14)..(15)..(16)..(17)..(18): Xaa is A or G
  MOD_RES (19)..(20)..(21)..(22): Xaa is A or G or is absent

SEQ ID NO: 82654 - protein, 41 aa, Artificial Sequence; identical to SEQ ID NO: 17700
  GFR-binding peptide
  MOD_RES (1)..(35): Xaa is C or S

SEQ ID NO: 82655 - protein, 37 aa, Artificial Sequence; identical to SEQ ID NO: 18528
  GFR-binding peptide
  MOD_RES (1)..(35): Xaa is C or S

SEQ ID NO: 82656 - protein, 33 aa, Artificial Sequence; identical to SEQ ID NO: 48603
  GFR-binding peptide
  MOD_RES (1)..(32)..(33): Xaa is C or S

SEQ ID NO: 82657 - protein, 41 aa, Artificial Sequence; identical to SEQ ID NO: 17701
  GFR-binding peptide
  MOD_RES (1)..(35): Xaa is C or S
  MOD_RES (13)..(14)..(15)..(16)..(17): Xaa is A or G
  MOD_RES (18)..(19)..(20)..(21): Xaa is A or G or is absent

SEQ ID NO: 82658 - protein, 37 aa, Artificial Sequence; identical to SEQ ID NO: 18530
  GFR-binding peptide
  MOD_RES (1)..(35): Xaa is C or S
  MOD_RES (13)..(14)..(15)..(16)..(17): Xaa is A or G
  MOD_RES (18)..(19)..(20)..(21): Xaa is A or G or is absent

SEQ ID NO: 82659 - protein, 35 aa, Artificial Sequence; identical to SEQ ID NO: 18531
  GFR-binding peptide
  MOD_RES (35)..(35): Xaa is C or S

SEQ ID NO: 82660 - protein, 35 aa, Artificial Sequence; identical to SEQ ID NO: 48605
  GFR-binding peptide
  MOD_RES (1)..(32)..(33): Xaa is C or S

SEQ ID NO: 82661 - protein, 40 aa, Artificial Sequence; identical to SEQ ID NO: 17704
  GFR-binding peptide
  MOD_RES (2)..(4): Xaa is C or S
  MOD_RES (17)..(18)..(19)..(20)..(21): Xaa is A or G
  MOD_RES (22)..(23)..(24)..(25): Xaa is A or G or is absent

SEQ ID NO: 82662 - protein, 34 aa, Artificial Sequence; identical to SEQ ID NO: 17705
  GFR-binding peptide
  MOD_RES (1)..(1): Xaa is C or S
  MOD_RES (13)..(14)..(15)..(16)..(17): Xaa is A or G
  MOD_RES (18)..(19)..(20)..(21): Xaa is A or G or is absent

SEQ ID NO: 82663 - protein, 38 aa, Artificial Sequence; identical to SEQ ID NO: 18532
  GFR-binding peptide
  MOD_RES (37)..(37): Xaa is C or S

SEQ ID NO: 82664 - protein, 40 aa, Artificial Sequence; identical to SEQ ID NO: 49878
  GFR-binding peptide
  MOD_RES (2)..(35)..(36): Xaa is C or S
  MOD_RES (13)..(14)..(15)..(16)..(17): Xaa is A or G
  MOD_RES (18)..(19)..(20)..(21): Xaa is A or G or is absent

SEQ ID NO: 82665 - protein, 37 aa, Artificial Sequence; identical to SEQ ID NO: 17706
  GFR-binding peptide
  MOD_RES (36)..(36): Xaa is C or S
  MOD_RES (12)..(13)..(14)..(15)..(16): Xaa is A or G
  MOD_RES (17)..(18)..(19)..(20): Xaa is A or G or is absent

SEQ ID NO: 82666 - protein, 32 aa, Artificial Sequence; identical to SEQ ID NO: 48609
  GFR-binding peptide
  MOD_RES (2)..(2): Xaa is C or S

SEQ ID NO: 82667 - protein, 38 aa, Artificial Sequence; identical to SEQ ID NO: 48611
  GFR-binding peptide
  MOD_RES (2)..(4)..(35)..(36): Xaa is C or S

SEQ ID NO: 82668 - protein, 33 aa, Artificial Sequence; identical to SEQ ID NO: 48613
  GFR-binding peptide
  MOD_RES (31)..(32): Xaa is C or S

SEQ ID NO: 82669 - protein, 38 aa, Artificial Sequence; identical to SEQ ID NO: 47346
  GFR-binding peptide
  MOD_RES (2)..(33)..(34): Xaa is C or S

SEQ ID NO: 82670 - protein, 40 aa, Artificial Sequence; identical to SEQ ID NO: 17707
  GFR-binding peptide
  MOD_RES (1)..(3)..(37): Xaa is C or S

SEQ ID NO: 82671 - protein, 36 aa, Artificial Sequence; identical to SEQ ID NO: 18534
  GFR-binding peptide
  MOD_RES (1)..(3): Xaa is C or S
  MOD_RES (15)..(16)..(17)..(18)..(19): Xaa is A or G
  MOD_RES (20)..(21)..(22)..(23): Xaa is A or G or is absent

SEQ ID NO: 82672 - protein, 35 aa, Artificial Sequence; identical to SEQ ID NO: 47349
  GFR-binding peptide
  MOD_RES (33)..(34): Xaa is C or S
  MOD_RES (11)..(12)..(13)..(14)..(15): Xaa is A or G
  MOD_RES (16)..(17)..(18)..(19): Xaa is A or G or is absent

SEQ ID NO: 82673 - protein, 36 aa, Artificial Sequence; identical to SEQ ID NO: 18535
  GFR-binding peptide
  MOD_RES (36)..(36): Xaa is C or S
  MOD_RES (12)..(13)..(14)..(15)..(16): Xaa is A or G
  MOD_RES (17)..(18)..(19)..(20): Xaa is A or G or is absent

SEQ ID NO: 82674 - protein, 40 aa, Artificial Sequence; identical to SEQ ID NO: 18536
  GFR-binding peptide
  MOD_RES (1)..(35): Xaa is C or S

SEQ ID NO: 82675 - protein, 38 aa, Artificial Sequence; identical to SEQ ID NO: 17709
  GFR-binding peptide
  MOD_RES (2)..(2): Xaa is C or S

SEQ ID NO: 82676 - protein, 42 aa, Artificial Sequence; identical to SEQ ID NO: 17710
  GFR-binding peptide
  MOD_RES (2)..(39): Xaa is C or S
  MOD_RES (15)..(16)..(17)..(18)..(19): Xaa is A or G
  MOD_RES (20)..(21)..(22)..(23): Xaa is A or G or is absent

SEQ ID NO: 82677 - protein, 37 aa, Artificial Sequence; identical to SEQ ID NO: 18538
  GFR-binding peptide
  MOD_RES (1)..(3)..(37): Xaa is C or S
  MOD_RES (15)..(16)..(17)..(18)..(19): Xaa is A or G
  MOD_RES (20)..(21)..(22)..(23): Xaa is A or G or is absent

SEQ ID NO: 82678 - protein, 40 aa, Artificial Sequence; identical to SEQ ID NO: 18539
  GFR-binding peptide
  MOD_RES (1)..(35): Xaa is C or S

SEQ ID NO: 82679 - protein, 37 aa, Artificial Sequence; identical to SEQ ID NO: 18540
  GFR-binding peptide
  MOD_RES (35)..(35): Xaa is C or S

SEQ ID NO: 82680 - protein, 36 aa, Artificial Sequence; identical to SEQ ID NO: 18541
  GFR-binding peptide
  MOD_RES (35)..(35): Xaa is C or S
  MOD_RES (11)..(12)..(13)..(14)..(15): Xaa is A or G
  MOD_RES (16)..(17)..(18)..(19): Xaa is A or G or is absent

SEQ ID NO: 82681 - protein, 40 aa, Artificial Sequence; identical to SEQ ID NO: 18543
  GFR-binding peptide
  MOD_RES (1)..(38): Xaa is C or S
  MOD_RES (14)..(15)..(16)..(17)..(18): Xaa is A or G
  MOD_RES (19)..(20)..(21)..(22): Xaa is A or G or is absent

SEQ ID NO: 82682 - protein, 34 aa, Artificial Sequence; identical to SEQ ID NO: 18545
  GFR-binding peptide
  MOD_RES (11)..(12)..(13)..(14)..(15): Xaa is A or G
  MOD_RES (16)..(17)..(18)..(19): Xaa is A or G or is absent

SEQ ID NO: 82683 - protein, 39 aa, Artificial Sequence; identical to SEQ ID NO: 51140
  GFR-binding peptide
  MOD_RES (2)..(33)..(34): Xaa is C or S

SEQ ID NO: 82684 - protein, 32 aa, Artificial Sequence; identical to SEQ ID NO: 17712
  GFR-binding peptide
  MOD_RES (11)..(12)..(13)..(14)..(15): Xaa is A or G
  MOD_RES (16)..(17)..(18)..(19): Xaa is A or G or is absent

SEQ ID NO: 82685 - protein, 35 aa, Artificial Sequence; identical to SEQ ID NO: 49893
  GFR-binding peptide
  MOD_RES (31)..(32): Xaa is C or S

SEQ ID NO: 82686 - protein, 32 aa, Artificial Sequence; identical to SEQ ID NO: 17713
  GFR-binding peptide
  MOD_RES (11)..(12)..(13)..(14)..(15): Xaa is A or G
  MOD_RES (16)..(17)..(18)..(19): Xaa is A or G or is absent

SEQ ID NO: 82687 - protein, 40 aa, Artificial Sequence; identical to SEQ ID NO: 48632
  GFR-binding peptide
  MOD_RES (1)..(3)..(36)..(37): Xaa is C or S
  MOD_RES (14)..(15)..(16)..(17)..(18): Xaa is A or G
  MOD_RES (19)..(20)..(21)..(22): Xaa is A or G or is absent

SEQ ID NO: 82688 - protein, 38 aa, Artificial Sequence; identical to SEQ ID NO: 49897
  GFR-binding peptide
  MOD_RES (33)..(34): Xaa is C or S
  MOD_RES (11)..(12)..(13)..(14)..(15): Xaa is A or G
  MOD_RES (16)..(17)..(18)..(19): Xaa is A or G or is absent

SEQ ID NO: 82689 - protein, 40 aa, Artificial Sequence; identical to SEQ ID NO: 18547
  GFR-binding peptide
  MOD_RES (2)..(4): Xaa is C or S

SEQ ID NO: 82690 - protein, 41 aa, Artificial Sequence; identical to SEQ ID NO: 49900
  GFR-binding peptide
  MOD_RES (2)..(4)..(35)..(36): Xaa is C or S

SEQ ID NO: 82691 - protein, 41 aa, Artificial Sequence; identical to SEQ ID NO: 17717
  GFR-binding peptide
  MOD_RES (1)..(3)..(37): Xaa is C or S

SEQ ID NO: 82692 - protein, 36 aa, Artificial Sequence; identical to SEQ ID NO: 18548
  GFR-binding peptide
  MOD_RES (2)..(2): Xaa is C or S

SEQ ID NO: 82693 - protein, 33 aa, Artificial Sequence; identical to SEQ ID NO: 18551
  GFR-binding peptide

SEQ ID NO: 82694 - protein, 34 aa, Artificial Sequence; identical to SEQ ID NO: 18552
  GFR-binding peptide

SEQ ID NO: 82695 - protein, 38 aa, Artificial Sequence; identical to SEQ ID NO: 51150
  GFR-binding peptide
  MOD_RES (1)..(34)..(35): Xaa is C or S
  MOD_RES (12)..(13)..(14)..(15)..(16): Xaa is A or G
  MOD_RES (17)..(18)..(19)..(20): Xaa is A or G or is absent

SEQ ID NO: 82696 - protein, 36 aa, Artificial Sequence; identical to SEQ ID NO: 17718
  GFR-binding peptide
  MOD_RES (34)..(34): Xaa is C or S
  MOD_RES (12)..(13)..(14)..(15)..(16): Xaa is A or G
  MOD_RES (17)..(18)..(19)..(20): Xaa is A or G or is absent

SEQ ID NO: 82697 - protein, 35 aa, Artificial Sequence; identical to SEQ ID NO: 47368
  GFR-binding peptide
  MOD_RES (2)..(4)..(35): Xaa is C or S

SEQ ID NO: 82698 - protein, 36 aa, Artificial Sequence; identical to SEQ ID NO: 51151
  GFR-binding peptide
  MOD_RES (2)..(4)..(35)..(36): Xaa is C or S

SEQ ID NO: 82699 - protein, 34 aa, Artificial Sequence; identical to SEQ ID NO: 17721
  GFR-binding peptide
  MOD_RES (11)..(12)..(13)..(14)..(15): Xaa is A or G
  MOD_RES (16)..(17)..(18)..(19): Xaa is A or G or is absent

SEQ ID NO: 82700 - protein, 36 aa, Artificial Sequence; identical to SEQ ID NO: 18556
  GFR-binding peptide
  MOD_RES (1)..(1): Xaa is C or S
  MOD_RES (14)..(15)..(16)..(17)..(18): Xaa is A or G
  MOD_RES (19)..(20)..(21)..(22): Xaa is A or G or is absent

SEQ ID NO: 82701 - protein, 39 aa, Artificial Sequence; identical to SEQ ID NO: 18557
  GFR-binding peptide
  MOD_RES (2)..(36): Xaa is C or S
  MOD_RES (14)..(15)..(16)..(17)..(18): Xaa is A or G
  MOD_RES (19)..(20)..(21)..(22): Xaa is A or G or is absent

SEQ ID NO: 82702 - protein, 41 aa, Artificial Sequence; identical to SEQ ID NO: 17723
  GFR-binding peptide
  MOD_RES (1)..(38): Xaa is C or S
  MOD_RES (14)..(15)..(16)..(17)..(18): Xaa is A or G
  MOD_RES (19)..(20)..(21)..(22): Xaa is A or G or is absent

SEQ ID NO: 82703 - protein, 40 aa, Artificial Sequence; identical to SEQ ID NO: 51158
  GFR-binding peptide
  MOD_RES (2)..(35)..(36): Xaa is C or S
  MOD_RES (13)..(14)..(15)..(16)..(17): Xaa is A or G
  MOD_RES (18)..(19)..(20)..(21): Xaa is A or G or is absent

SEQ ID NO: 82704 - protein, 36 aa, Artificial Sequence; identical to SEQ ID NO: 18558
  GFR-binding peptide
  MOD_RES (36)..(36): Xaa is C or S

SEQ ID NO: 82705 - protein, 38 aa, Artificial Sequence; identical to SEQ ID NO: 17725
  GFR-binding peptide
  MOD_RES (35)..(35): Xaa is C or S

SEQ ID NO: 82706 - protein, 39 aa, Artificial Sequence; identical to SEQ ID NO: 49912
  GFR-binding peptide
  MOD_RES (2)..(33)..(34): Xaa is C or S

SEQ ID NO: 82707 - protein, 35 aa, Artificial Sequence; identical to SEQ ID NO: 17726
  GFR-binding peptide
  MOD_RES (34)..(34): Xaa is C or S
  MOD_RES (12)..(13)..(14)..(15)..(16): Xaa is A or G
  MOD_RES (17)..(18)..(19)..(20): Xaa is A or G or is absent

SEQ ID NO: 82708 - protein, 33 aa, Artificial Sequence; identical to SEQ ID NO: 17727
  GFR-binding peptide
  MOD_RES (33)..(33): Xaa is C or S
  MOD_RES (11)..(12)..(13)..(14)..(15): Xaa is A or G
  MOD_RES (16)..(17)..(18)..(19): Xaa is A or G or is absent

SEQ ID NO: 82709 - protein, 36 aa, Artificial Sequence; identical to SEQ ID NO: 49913
  GFR-binding peptide
  MOD_RES (2)..(4)..(35)..(36): Xaa is C or S

SEQ ID NO: 82710 - protein, 41 aa, Artificial Sequence; identical to SEQ ID NO: 18561
  GFR-binding peptide
  MOD_RES (37)..(37): Xaa is C or S
  MOD_RES (13)..(14)..(15)..(16)..(17): Xaa is A or G
  MOD_RES (18)..(19)..(20)..(21): Xaa is A or G or is absent

SEQ ID NO: 82711 - protein, 42 aa, Artificial Sequence; identical to SEQ ID NO: 18562
  GFR-binding peptide
  MOD_RES (2)..(4)..(41): Xaa is C or S
  MOD_RES (17)..(18)..(19)..(20)..(21): Xaa is A or G
  MOD_RES (22)..(23)..(24)..(25): Xaa is A or G or is absent

SEQ ID NO: 82712 - protein, 35 aa, Artificial Sequence; identical to SEQ ID NO: 17729
  GFR-binding peptide
  MOD_RES (35)..(35): Xaa is C or S

SEQ ID NO: 82713 - protein, 37 aa, Artificial Sequence; identical to SEQ ID NO: 49917
  GFR-binding peptide
  MOD_RES (2)..(4)..(35)..(36): Xaa is C or S

SEQ ID NO: 82714 - protein, 40 aa, Artificial Sequence; identical to SEQ ID NO: 49918
  GFR-binding peptide
  MOD_RES (1)..(3)..(36)..(37): Xaa is C or S
  MOD_RES (14)..(15)..(16)..(17)..(18): Xaa is A or G
  MOD_RES (19)..(20)..(21)..(22): Xaa is A or G or is absent

SEQ ID NO: 82715 - protein, 39 aa, Artificial Sequence; identical to SEQ ID NO: 18564
  GFR-binding peptide
  MOD_RES (2)..(4)..(38): Xaa is C or S

SEQ ID NO: 82716 - protein, 37 aa, Artificial Sequence; identical to SEQ ID NO: 17730
  GFR-binding peptide
  MOD_RES (2)..(4): Xaa is C or S
  MOD_RES (16)..(17)..(18)..(19)..(20): Xaa is A or G
  MOD_RES (21)..(22)..(23)..(24): Xaa is A or G or is absent

SEQ ID NO: 82717 - protein, 40 aa, Artificial Sequence; identical to SEQ ID NO: 18567
  GFR-binding peptide
  MOD_RES (1)..(38): Xaa is C or S

SEQ ID NO: 82718 - protein, 37 aa, Artificial Sequence; identical to SEQ ID NO: 51170
  GFR-binding peptide
  MOD_RES (2)..(33)..(34): Xaa is C or S

SEQ ID NO: 82719 - protein, 41 aa, Artificial Sequence; identical to SEQ ID NO: 17734
  GFR-binding peptide
  MOD_RES (37)..(37): Xaa is C or S
  MOD_RES (13)..(14)..(15)..(16)..(17): Xaa is A or G
  MOD_RES (18)..(19)..(20)..(21): Xaa is A or G or is absent

SEQ ID NO: 82720 - protein, 36 aa, Artificial Sequence; identical to SEQ ID NO: 17736
  GFR-binding peptide
  MOD_RES (2)..(36): Xaa is C or S

SEQ ID NO: 82721 - protein, 35 aa, Artificial Sequence; identical to SEQ ID NO: 17737
  GFR-binding peptide

SEQ ID NO: 82722 - protein, 38 aa, Artificial Sequence; identical to SEQ ID NO: 17738
  GFR-binding peptide
  MOD_RES (1)..(3)..(37): Xaa is C or S
  MOD_RES (15)..(16)..(17)..(18)..(19): Xaa is A or G
  MOD_RES (20)..(21)..(22)..(23): Xaa is A or G or is absent

SEQ ID NO: 82723 - protein, 42 aa, Artificial Sequence; identical to SEQ ID NO: 18569
  GFR-binding peptide
  MOD_RES (2)..(36): Xaa is C or S
  MOD_RES (14)..(15)..(16)..(17)..(18): Xaa is A or G
  MOD_RES (19)..(20)..(21)..(22): Xaa is A or G or is absent

SEQ ID NO: 82724 - protein, 35 aa, Artificial Sequence; identical to SEQ ID NO: 49926
  GFR-binding peptide
  MOD_RES (33)..(34): Xaa is C or S
  MOD_RES (11)..(12)..(13)..(14)..(15): Xaa is A or G
  MOD_RES (16)..(17)..(18)..(19): Xaa is A or G or is absent

SEQ ID NO: 82725 - protein, 39 aa, Artificial Sequence; identical to SEQ ID NO: 51180
  GFR-binding peptide
  MOD_RES (2)..(4)..(37)..(38): Xaa is C or S
  MOD_RES (15)..(16)..(17)..(18)..(19): Xaa is A or G
  MOD_RES (20)..(21)..(22)..(23): Xaa is A or G or is absent

SEQ ID NO: 82726 - protein, 36 aa, Artificial Sequence; identical to SEQ ID NO: 17741
  GFR-binding peptide
  MOD_RES (2)..(2): Xaa is C or S

SEQ ID NO: 82727 - protein, 41 aa, Artificial Sequence; identical to SEQ ID NO: 18571
  GFR-binding peptide
  MOD_RES (2)..(36): Xaa is C or S
  MOD_RES (14)..(15)..(16)..(17)..(18): Xaa is A or G
  MOD_RES (19)..(20)..(21)..(22): Xaa is A or G or is absent

SEQ ID NO: 82728 - protein, 42 aa, Artificial Sequence; identical to SEQ ID NO: 17742
  GFR-binding peptide
  MOD_RES (1)..(3)..(40): Xaa is C or S

SEQ ID NO: 82729 - protein, 38 aa, Artificial Sequence; identical to SEQ ID NO: 17743
  GFR-binding peptide
  MOD_RES (2)..(36): Xaa is C or S
  MOD_RES (14)..(15)..(16)..(17)..(18): Xaa is A or G
  MOD_RES (19)..(20)..(21)..(22): Xaa is A or G or is absent

SEQ ID NO: 82730 - protein, 36 aa, Artificial Sequence; identical to SEQ ID NO: 17744
  GFR-binding peptide
  MOD_RES (1)..(1): Xaa is C or S
  MOD_RES (14)..(15)..(16)..(17)..(18): Xaa is A or G
  MOD_RES (19)..(20)..(21)..(22): Xaa is A or G or is absent

SEQ ID NO: 82731 - protein, 37 aa, Artificial Sequence; identical to SEQ ID NO: 17745
  GFR-binding peptide
  MOD_RES (34)..(34): Xaa is C or S
  MOD_RES (12)..(13)..(14)..(15)..(16): Xaa is A or G
  MOD_RES (17)..(18)..(19)..(20): Xaa is A or G or is absent

SEQ ID NO: 82732 - protein, 41 aa, Artificial Sequence; identical to SEQ ID NO: 47409
  GFR-binding peptide
  MOD_RES (2)..(4)..(37)..(38): Xaa is C or S
  MOD_RES (15)..(16)..(17)..(18)..(19): Xaa is A or G
  MOD_RES (20)..(21)..(22)..(23): Xaa is A or G or is absent

SEQ ID NO: 82733 - protein, 34 aa, Artificial Sequence; identical to SEQ ID NO: 17746
  GFR-binding peptide

SEQ ID NO: 82734 - protein, 38 aa, Artificial Sequence; identical to SEQ ID NO: 17747
  GFR-binding peptide
  MOD_RES (1)..(35): Xaa is C or S

SEQ ID NO: 82735 - protein, 44 aa, Artificial Sequence; identical to SEQ ID NO: 17748
  GFR-binding peptide
  MOD_RES (2)..(4)..(41): Xaa is C or S

SEQ ID NO: 82736 - protein, 33 aa, Artificial Sequence; identical to SEQ ID NO: 17749
  GFR-binding peptide
  MOD_RES (33)..(33): Xaa is C or S
  MOD_RES (11)..(12)..(13)..(14)..(15): Xaa is A or G
  MOD_RES (16)..(17)..(18)..(19): Xaa is A or G or is absent

SEQ ID NO: 82737 - protein, 43 aa, Artificial Sequence; identical to SEQ ID NO: 48672
  GFR-binding peptide
  MOD_RES (2)..(4)..(37)..(38): Xaa is C or S
  MOD_RES (15)..(16)..(17)..(18)..(19): Xaa is A or G
  MOD_RES (20)..(21)..(22)..(23): Xaa is A or G or is absent

SEQ ID NO: 82738 - protein, 36 aa, Artificial Sequence; identical to SEQ ID NO: 49940
  GFR-binding peptide
  MOD_RES (1)..(3)..(34)..(35): Xaa is C or S

SEQ ID NO: 82739 - protein, 35 aa, Artificial Sequence; identical to SEQ ID NO: 18576
  GFR-binding peptide

SEQ ID NO: 82740 - protein, 37 aa, Artificial Sequence; identical to SEQ ID NO: 48678
  GFR-binding peptide
  MOD_RES (31)..(32): Xaa is C or S

SEQ ID NO: 82741 - protein, 39 aa, Artificial Sequence; identical to SEQ ID NO: 17750
  GFR-binding peptide
  MOD_RES (35)..(35): Xaa is C or S
  MOD_RES (11)..(12)..(13)..(14)..(15): Xaa is A or G
  MOD_RES (16)..(17)..(18)..(19): Xaa is A or G or is absent

SEQ ID NO: 82742 - protein, 37 aa, Artificial Sequence; identical to SEQ ID NO: 47422
  GFR-binding peptide
  MOD_RES (1)..(3)..(36)..(37): Xaa is C or S
  MOD_RES (14)..(15)..(16)..(17)..(18): Xaa is A or G
  MOD_RES (19)..(20)..(21)..(22): Xaa is A or G or is absent

SEQ ID NO: 82743 - protein, 42 aa, Artificial Sequence; identical to SEQ ID NO: 17751
  GFR-binding peptide
  MOD_RES (1)..(3)..(40): Xaa is C or S

SEQ ID NO: 82744 - protein, 39 aa, Artificial Sequence; identical to SEQ ID NO: 18582
  GFR-binding peptide
  MOD_RES (2)..(4)..(38): Xaa is C or S

SEQ ID NO: 82745 - protein, 42 aa, Artificial Sequence; identical to SEQ ID NO: 17754
  GFR-binding peptide
  MOD_RES (1)..(3)..(37): Xaa is C or S

SEQ ID NO: 82746 - protein, 37 aa, Artificial Sequence; identical to SEQ ID NO: 48683
  GFR-binding peptide
  MOD_RES (33)..(34): Xaa is C or S
  MOD_RES (11)..(12)..(13)..(14)..(15): Xaa is A or G
  MOD_RES (16)..(17)..(18)..(19): Xaa is A or G or is absent

SEQ ID NO: 82747 - protein, 39 aa, Artificial Sequence; identical to SEQ ID NO: 18585
  GFR-binding peptide
  MOD_RES (35)..(35): Xaa is C or S
  MOD_RES (11)..(12)..(13)..(14)..(15): Xaa is A or G
  MOD_RES (16)..(17)..(18)..(19): Xaa is A or G or is absent

SEQ ID NO: 82748 - protein, 35 aa, Artificial Sequence; identical to SEQ ID NO: 49947
  GFR-binding peptide
  MOD_RES (1)..(3): Xaa is C or S
  MOD_RES (14)..(15)..(16)..(17)..(18): Xaa is A or G
  MOD_RES (19)..(20)..(21)..(22): Xaa is A or G or is absent

SEQ ID NO: 82749 - protein, 41 aa, Artificial Sequence; identical to SEQ ID NO: 17756
  GFR-binding peptide
  MOD_RES (37)..(37): Xaa is C or S

SEQ ID NO: 82750 - protein, 42 aa, Artificial Sequence; identical to SEQ ID NO: 48686
  GFR-binding peptide
  MOD_RES (1)..(3)..(36)..(37): Xaa is C or S
  MOD_RES (14)..(15)..(16)..(17)..(18): Xaa is A or G
  MOD_RES (19)..(20)..(21)..(22): Xaa is A or G or is absent

SEQ ID NO: 82751 - protein, 35 aa, Artificial Sequence; identical to SEQ ID NO: 47428
  GFR-binding peptide
  MOD_RES (1)..(34)..(35): Xaa is C or S
  MOD_RES (12)..(13)..(14)..(15)..(16): Xaa is A or G
  MOD_RES (17)..(18)..(19)..(20): Xaa is A or G or is absent

SEQ ID NO: 82752 - protein, 35 aa, Artificial Sequence; identical to SEQ ID NO: 49951
  GFR-binding peptide
  MOD_RES (1)..(32)..(33): Xaa is C or S

SEQ ID NO: 82753 - protein, 36 aa, Artificial Sequence; identical to SEQ ID NO: 18586
  GFR-binding peptide

SEQ ID NO: 82754 - protein, 36 aa, Artificial Sequence; identical to SEQ ID NO: 17758
  GFR-binding peptide
  MOD_RES (33)..(33): Xaa is C or S

SEQ ID NO: 82755 - protein, 40 aa, Artificial Sequence; identical to SEQ ID NO: 18587
  GFR-binding peptide
  MOD_RES (1)..(3)..(37): Xaa is C or S

SEQ ID NO: 82756 - protein, 34 aa, Artificial Sequence; identical to SEQ ID NO: 18588
  GFR-binding peptide

SEQ ID NO: 82757 - protein, 38 aa, Artificial Sequence; identical to SEQ ID NO: 18589
  GFR-binding peptide
  MOD_RES (2)..(4)..(38): Xaa is C or S
  MOD_RES (16)..(17)..(18)..(19)..(20): Xaa is A or G
  MOD_RES (21)..(22)..(23)..(24): Xaa is A or G or is absent

SEQ ID NO: 82758 - protein, 39 aa, Artificial Sequence; identical to SEQ ID NO: 49956
  GFR-binding peptide
  MOD_RES (2)..(4)..(37)..(38): Xaa is C or S
  MOD_RES (15)..(16)..(17)..(18)..(19): Xaa is A or G
  MOD_RES (20)..(21)..(22)..(23): Xaa is A or G or is absent

SEQ ID NO: 82759 - protein, 37 aa, Artificial Sequence; identical to SEQ ID NO: 17759
  GFR-binding peptide
  MOD_RES (36)..(36): Xaa is C or S

SEQ ID NO: 82760 - protein, 39 aa, Artificial Sequence; identical to SEQ ID NO: 17761
  GFR-binding peptide
  MOD_RES (1)..(3): Xaa is C or S
  MOD_RES (16)..(17)..(18)..(19)..(20): Xaa is A or G
  MOD_RES (21)..(22)..(23)..(24): Xaa is A or G or is absent

SEQ ID NO: 82761 - protein, 43 aa, Artificial Sequence; identical to SEQ ID NO: 17762
  GFR-binding peptide
  MOD_RES (1)..(3)..(40): Xaa is C or S

SEQ ID NO: 82762 - protein, 41 aa, Artificial Sequence; identical to SEQ ID NO: 17764
  GFR-binding peptide
  MOD_RES (1)..(3)..(40): Xaa is C or S
  MOD_RES (16)..(17)..(18)..(19)..(20): Xaa is A or G
  MOD_RES (21)..(22)..(23)..(24): Xaa is A or G or is absent

SEQ ID NO: 82763 - protein, 38 aa, Artificial Sequence; identical to SEQ ID NO: 18593
  GFR-binding peptide
  MOD_RES (1)..(35): Xaa is C or S

SEQ ID NO: 82764 - protein, 42 aa, Artificial Sequence; identical to SEQ ID NO: 18594
  GFR-binding peptide
  MOD_RES (1)..(3)..(40): Xaa is C or S

SEQ ID NO: 82765 - protein, 40 aa, Artificial Sequence; identical to SEQ ID NO: 48695
  GFR-binding peptide
  MOD_RES (2)..(35)..(36): Xaa is C or S
  MOD_RES (13)..(14)..(15)..(16)..(17): Xaa is A or G
  MOD_RES (18)..(19)..(20)..(21): Xaa is A or G or is absent

SEQ ID NO: 82766 - protein, 41 aa, Artificial Sequence; identical to SEQ ID NO: 18595
  GFR-binding peptide
  MOD_RES (1)..(35): Xaa is C or S

SEQ ID NO: 82767 - protein, 40 aa, Artificial Sequence; identical to SEQ ID NO: 18596
  GFR-binding peptide
  MOD_RES (36)..(36): Xaa is C or S
  MOD_RES (12)..(13)..(14)..(15)..(16): Xaa is A or G
  MOD_RES (17)..(18)..(19)..(20): Xaa is A or G or is absent

SEQ ID NO: 82768 - protein, 39 aa, Artificial Sequence; identical to SEQ ID NO: 18597
  GFR-binding peptide
  MOD_RES (36)..(36): Xaa is C or S
  MOD_RES (12)..(13)..(14)..(15)..(16): Xaa is A or G
  MOD_RES (17)..(18)..(19)..(20): Xaa is A or G or is absent

SEQ ID NO: 82769 - protein, 36 aa, Artificial Sequence; identical to SEQ ID NO: 17765
  GFR-binding peptide
  MOD_RES (34)..(34): Xaa is C or S
  MOD_RES (12)..(13)..(14)..(15)..(16): Xaa is A or G
  MOD_RES (17)..(18)..(19)..(20): Xaa is A or G or is absent

SEQ ID NO: 82770 - protein, 35 aa, Artificial Sequence; identical to SEQ ID NO: 17766
  GFR-binding peptide
  MOD_RES (2)..(2): Xaa is C or S
  MOD_RES (14)..(15)..(16)..(17)..(18): Xaa is A or G
  MOD_RES (19)..(20)..(21)..(22): Xaa is A or G or is absent

SEQ ID NO: 82771 - protein, 37 aa, Artificial Sequence; identical to SEQ ID NO: 51220
  GFR-binding peptide
  MOD_RES (33)..(34): Xaa is C or S
  MOD_RES (11)..(12)..(13)..(14)..(15): Xaa is A or G
  MOD_RES (16)..(17)..(18)..(19): Xaa is A or G or is absent

SEQ ID NO: 82772 - protein, 33 aa, Artificial Sequence; identical to SEQ ID NO: 48707
  GFR-binding peptide
  MOD_RES (31)..(32): Xaa is C or S

SEQ ID NO: 82773 - protein, 41 aa, Artificial Sequence; identical to SEQ ID NO: 17769
  GFR-binding peptide
  MOD_RES (2)..(36): Xaa is C or S

SEQ ID NO: 82774 - protein, 38 aa, Artificial Sequence; identical to SEQ ID NO: 49971
  GFR-binding peptide
  MOD_RES (1)..(3)..(36)..(37): Xaa is C or S
  MOD_RES (14)..(15)..(16)..(17)..(18): Xaa is A or G
  MOD_RES (19)..(20)..(21)..(22): Xaa is A or G or is absent

SEQ ID NO: 82775 - protein, 32 aa, Artificial Sequence; identical to SEQ ID NO: 51223
  GFR-binding peptide
  MOD_RES (2)..(2): Xaa is C or S

SEQ ID NO: 82776 - protein, 37 aa, Artificial Sequence; identical to SEQ ID NO: 51230
  GFR-binding peptide
  MOD_RES (1)..(32)..(33): Xaa is C or S

SEQ ID NO: 82777 - protein, 32 aa, Artificial Sequence; identical to SEQ ID NO: 48712
  GFR-binding peptide
  MOD_RES (31)..(32): Xaa is C or S

SEQ ID NO: 82778 - protein, 35 aa, Artificial Sequence; identical to SEQ ID NO: 18605
  GFR-binding peptide
  MOD_RES (1)..(35): Xaa is C or S

SEQ ID NO: 82779 - protein, 38 aa, Artificial Sequence; identical to SEQ ID NO: 17770
  GFR-binding peptide
  MOD_RES (37)..(37): Xaa is C or S
  MOD_RES (13)..(14)..(15)..(16)..(17): Xaa is A or G
  MOD_RES (18)..(19)..(20)..(21): Xaa is A or G or is absent

SEQ ID NO: 82780 - protein, 39 aa, Artificial Sequence; identical to SEQ ID NO: 49976
  GFR-binding peptide
  MOD_RES (33)..(34): Xaa is C or S
  MOD_RES (11)..(12)..(13)..(14)..(15): Xaa is A or G
  MOD_RES (16)..(17)..(18)..(19): Xaa is A or G or is absent

SEQ ID NO: 82781 - protein, 36 aa, Artificial Sequence; identical to SEQ ID NO: 17771
  GFR-binding peptide
  MOD_RES (33)..(33): Xaa is C or S

SEQ ID NO: 82782 - protein, 43 aa, Artificial Sequence; identical to SEQ ID NO: 18608
  GFR-binding peptide
  MOD_RES (2)..(39): Xaa is C or S

SEQ ID NO: 82783 - protein, 36 aa, Artificial Sequence; identical to SEQ ID NO: 48719
  GFR-binding peptide
  MOD_RES (33)..(34): Xaa is C or S
  MOD_RES (11)..(12)..(13)..(14)..(15): Xaa is A or G
  MOD_RES (16)..(17)..(18)..(19): Xaa is A or G or is absent

SEQ ID NO: 82784 - protein, 41 aa, Artificial Sequence; identical to SEQ ID NO: 18609
  GFR-binding peptide
  MOD_RES (1)..(3)..(40): Xaa is C or S

SEQ ID NO: 82785 - protein, 36 aa, Artificial Sequence; identical to SEQ ID NO: 49977
  GFR-binding peptide
  MOD_RES (2)..(33)..(34): Xaa is C or S

SEQ ID NO: 82786 - protein, 35 aa, Artificial Sequence; identical to SEQ ID NO: 17773
  GFR-binding peptide
  MOD_RES (1)..(35): Xaa is C or S
  MOD_RES (13)..(14)..(15)..(16)..(17): Xaa is A or G
  MOD_RES (18)..(19)..(20)..(21): Xaa is A or G or is absent

SEQ ID NO: 82787 - protein, 42 aa, Artificial Sequence; identical to SEQ ID NO: 49978
  GFR-binding peptide
  MOD_RES (2)..(4)..(37)..(38): Xaa is C or S
  MOD_RES (15)..(16)..(17)..(18)..(19): Xaa is A or G
  MOD_RES (20)..(21)..(22)..(23): Xaa is A or G or is absent

SEQ ID NO: 82788 - protein, 37 aa, Artificial Sequence; identical to SEQ ID NO: 18610
  GFR-binding peptide
  MOD_RES (2)..(4): Xaa is C or S

SEQ ID NO: 82789 - protein, 31 aa, Artificial Sequence; identical to SEQ ID NO: 51237
  GFR-binding peptide
  MOD_RES (31)..(31): Xaa is C or S

SEQ ID NO: 82790 - protein, 37 aa, Artificial Sequence; identical to SEQ ID NO: 18611
  GFR-binding peptide
  MOD_RES (2)..(36): Xaa is C or S

SEQ ID NO: 82791 - protein, 41 aa, Artificial Sequence; identical to SEQ ID NO: 49983
  GFR-binding peptide
  MOD_RES (2)..(4)..(37)..(38): Xaa is C or S
  MOD_RES (15)..(16)..(17)..(18)..(19): Xaa is A or G
  MOD_RES (20)..(21)..(22)..(23): Xaa is A or G or is absent

SEQ ID NO: 82792 - protein, 36 aa, Artificial Sequence; identical to SEQ ID NO: 47464
  GFR-binding peptide
  MOD_RES (2)..(35)..(36): Xaa is C or S
  MOD_RES (13)..(14)..(15)..(16)..(17): Xaa is A or G
  MOD_RES (18)..(19)..(20)..(21): Xaa is A or G or is absent

SEQ ID NO: 82793 - protein, 40 aa, Artificial Sequence; identical to SEQ ID NO: 17774
  GFR-binding peptide
  MOD_RES (1)..(38): Xaa is C or S
  MOD_RES (14)..(15)..(16)..(17)..(18): Xaa is A or G
  MOD_RES (19)..(20)..(21)..(22): Xaa is A or G or is absent

SEQ ID NO: 82794 - protein, 33 aa, Artificial Sequence; identical to SEQ ID NO: 18614
  GFR-binding peptide
  MOD_RES (12)..(13)..(14)..(15)..(16): Xaa is A or G
  MOD_RES (17)..(18)..(19)..(20): Xaa is A or G or is absent

SEQ ID NO: 82795 - protein, 38 aa, Artificial Sequence; identical to SEQ ID NO: 17776
  GFR-binding peptide
  MOD_RES (1)..(3)..(37): Xaa is C or S

SEQ ID NO: 82796 - protein, 34 aa, Artificial Sequence; identical to SEQ ID NO: 17778
  GFR-binding peptide
  MOD_RES (1)..(1): Xaa is C or S

SEQ ID NO: 82797 - protein, 36 aa, Artificial Sequence; identical to SEQ ID NO: 49991
  GFR-binding peptide
  MOD_RES (1)..(32)..(33): Xaa is C or S

SEQ ID NO: 82798 - protein, 37 aa, Artificial Sequence; identical to SEQ ID NO: 17779
  GFR-binding peptide
  MOD_RES (36)..(36): Xaa is C or S

SEQ ID NO: 82799 - protein, 39 aa, Artificial Sequence; identical to SEQ ID NO: 18618
  GFR-binding peptide
  MOD_RES (2)..(4): Xaa is C or S
  MOD_RES (17)..(18)..(19)..(20)..(21): Xaa is A or G
  MOD_RES (22)..(23)..(24)..(25): Xaa is A or G or is absent

SEQ ID NO: 82800 - protein, 41 aa, Artificial Sequence; identical to SEQ ID NO: 49992
  GFR-binding peptide
  MOD_RES (2)..(35)..(36): Xaa is C or S
  MOD_RES (13)..(14)..(15)..(16)..(17): Xaa is A or G
  MOD_RES (18)..(19)..(20)..(21): Xaa is A or G or is absent

SEQ ID NO: 82801 - protein, 39 aa, Artificial Sequence; identical to SEQ ID NO: 17780
  GFR-binding peptide
  MOD_RES (1)..(38): Xaa is C or S

SEQ ID NO: 82802 - protein, 35 aa, Artificial Sequence; identical to SEQ ID NO: 47473
  GFR-binding peptide
  MOD_RES (1)..(32)..(33): Xaa is C or S

SEQ ID NO: 82803 - protein, 38 aa, Artificial Sequence; identical to SEQ ID NO: 48746
  GFR-binding peptide
  MOD_RES (2)..(33)..(34): Xaa is C or S

SEQ ID NO: 82804 - protein, 35 aa, Artificial Sequence; identical to SEQ ID NO: 17782
  GFR-binding peptide
  MOD_RES (1)..(1): Xaa is C or S
  MOD_RES (14)..(15)..(16)..(17)..(18): Xaa is A or G
  MOD_RES (19)..(20)..(21)..(22): Xaa is A or G or is absent

SEQ ID NO: 82805 - protein, 37 aa, Artificial Sequence; identical to SEQ ID NO: 18622
  GFR-binding peptide
  MOD_RES (2)..(36): Xaa is C or S

SEQ ID NO: 82806 - protein, 43 aa, Artificial Sequence; identical to SEQ ID NO: 18623
  GFR-binding peptide
  MOD_RES (2)..(4)..(41): Xaa is C or S
  MOD_RES (17)..(18)..(19)..(20)..(21): Xaa is A or G
  MOD_RES (22)..(23)..(24)..(25): Xaa is A or G or is absent

SEQ ID NO: 82807 - protein, 37 aa, Artificial Sequence; identical to SEQ ID NO: 51255
  GFR-binding peptide
  MOD_RES (1)..(34)..(35): Xaa is C or S
  MOD_RES (12)..(13)..(14)..(15)..(16): Xaa is A or G
  MOD_RES (17)..(18)..(19)..(20): Xaa is A or G or is absent

SEQ ID NO: 82808 - protein, 40 aa, Artificial Sequence; identical to SEQ ID NO: 17785
  GFR-binding peptide
  MOD_RES (2)..(4)..(38): Xaa is C or S

SEQ ID NO: 82809 - protein, 39 aa, Artificial Sequence; identical to SEQ ID NO: 50001
  GFR-binding peptide
  MOD_RES (2)..(33)..(34): Xaa is C or S

SEQ ID NO: 82810 - protein, 43 aa, Artificial Sequence; identical to SEQ ID NO: 17786
  GFR-binding peptide
  MOD_RES (1)..(3)..(37): Xaa is C or S
  MOD_RES (15)..(16)..(17)..(18)..(19): Xaa is A or G
  MOD_RES (20)..(21)..(22)..(23): Xaa is A or G or is absent

SEQ ID NO: 82811 - protein, 41 aa, Artificial Sequence; identical to SEQ ID NO: 18626
  GFR-binding peptide
  MOD_RES (2)..(4)..(38): Xaa is C or S

SEQ ID NO: 82812 - protein, 36 aa, Artificial Sequence; identical to SEQ ID NO: 48759
  GFR-binding peptide
  MOD_RES (33)..(34): Xaa is C or S
  MOD_RES (11)..(12)..(13)..(14)..(15): Xaa is A or G
  MOD_RES (16)..(17)..(18)..(19): Xaa is A or G or is absent

SEQ ID NO: 82813 - protein, 39 aa, Artificial Sequence; identical to SEQ ID NO: 47484
  GFR-binding peptide
  MOD_RES (33)..(34): Xaa is C or S
  MOD_RES (11)..(12)..(13)..(14)..(15): Xaa is A or G
  MOD_RES (16)..(17)..(18)..(19): Xaa is A or G or is absent

SEQ ID NO: 82814 - protein, 39 aa, Artificial Sequence; identical to SEQ ID NO: 47485
  GFR-binding peptide
  MOD_RES (1)..(3)..(34)..(35): Xaa is C or S

SEQ ID NO: 82815 - protein, 40 aa, Artificial Sequence; identical to SEQ ID NO: 18628
  GFR-binding peptide
  MOD_RES (2)..(4)..(38): Xaa is C or S

SEQ ID NO: 82816 - protein, 37 aa, Artificial Sequence; identical to SEQ ID NO: 51262
  GFR-binding peptide
  MOD_RES (33)..(34): Xaa is C or S
  MOD_RES (11)..(12)..(13)..(14)..(15): Xaa is A or G
  MOD_RES (16)..(17)..(18)..(19): Xaa is A or G or is absent

SEQ ID NO: 82817 - protein, 39 aa, Artificial Sequence; identical to SEQ ID NO: 18629
  GFR-binding peptide
  MOD_RES (1)..(3): Xaa is C or S

SEQ ID NO: 82818 - protein, 37 aa, Artificial Sequence; identical to SEQ ID NO: 17789
  GFR-binding peptide
  MOD_RES (2)..(2): Xaa is C or S

SEQ ID NO: 82819 - protein, 39 aa, Artificial Sequence; identical to SEQ ID NO: 18631
  GFR-binding peptide
  MOD_RES (37)..(37): Xaa is C or S

SEQ ID NO: 82820 - protein, 40 aa, Artificial Sequence; identical to SEQ ID NO: 18632
  GFR-binding peptide
  MOD_RES (34)..(34): Xaa is C or S

SEQ ID NO: 82821 - protein, 34 aa, Artificial Sequence; identical to SEQ ID NO: 18633
  GFR-binding peptide

SEQ ID NO: 82822 - protein, 44 aa, Artificial Sequence; identical to SEQ ID NO: 17791
  GFR-binding peptide
  MOD_RES (2)..(4)..(38): Xaa is C or S

SEQ ID NO: 82823 - protein, 39 aa, Artificial Sequence; identical to SEQ ID NO: 17792
  GFR-binding peptide
  MOD_RES (1)..(3)..(37): Xaa is C or S
  MOD_RES (15)..(16)..(17)..(18)..(19): Xaa is A or G
  MOD_RES (20)..(21)..(22)..(23): Xaa is A or G or is absent

SEQ ID NO: 82824 - protein, 39 aa, Artificial Sequence; identical to SEQ ID NO: 18635
  GFR-binding peptide
  MOD_RES (1)..(3)..(37): Xaa is C or S
  MOD_RES (15)..(16)..(17)..(18)..(19): Xaa is A or G
  MOD_RES (20)..(21)..(22)..(23): Xaa is A or G or is absent

SEQ ID NO: 82825 - protein, 38 aa, Artificial Sequence; identical to SEQ ID NO: 50019
  GFR-binding peptide
  MOD_RES (33)..(34): Xaa is C or S
  MOD_RES (11)..(12)..(13)..(14)..(15): Xaa is A or G
  MOD_RES (16)..(17)..(18)..(19): Xaa is A or G or is absent

SEQ ID NO: 82826 - protein, 35 aa, Artificial Sequence; identical to SEQ ID NO: 18638
  GFR-binding peptide
  MOD_RES (12)..(13)..(14)..(15)..(16): Xaa is A or G
  MOD_RES (17)..(18)..(19)..(20): Xaa is A or G or is absent

SEQ ID NO: 82827 - protein, 41 aa, Artificial Sequence; identical to SEQ ID NO: 18639
  GFR-binding peptide
  MOD_RES (2)..(39): Xaa is C or S
  MOD_RES (15)..(16)..(17)..(18)..(19): Xaa is A or G
  MOD_RES (20)..(21)..(22)..(23): Xaa is A or G or is absent

SEQ ID NO: 82828 - protein, 43 aa, Artificial Sequence; identical to SEQ ID NO: 18640
  GFR-binding peptide
  MOD_RES (1)..(3)..(40): Xaa is C or S
  MOD_RES (16)..(17)..(18)..(19)..(20): Xaa is A or G
  MOD_RES (21)..(22)..(23)..(24): Xaa is A or G or is absent

SEQ ID NO: 82829 - protein, 31 aa, Artificial Sequence; identical to SEQ ID NO: 51270
  GFR-binding peptide
  MOD_RES (1)..(1): Xaa is C or S

SEQ ID NO: 82830 - protein, 38 aa, Artificial Sequence; identical to SEQ ID NO: 18644
  GFR-binding peptide
  MOD_RES (2)..(36): Xaa is C or S

SEQ ID NO: 82831 - protein, 38 aa, Artificial Sequence; identical to SEQ ID NO: 50029
  GFR-binding peptide
  MOD_RES (1)..(32)..(33): Xaa is C or S

SEQ ID NO: 82832 - protein, 35 aa, Artificial Sequence; identical to SEQ ID NO: 50030
  GFR-binding peptide
  MOD_RES (1)..(3)..(34)..(35): Xaa is C or S

SEQ ID NO: 82833 - protein, 41 aa, Artificial Sequence; identical to SEQ ID NO: 18647
  GFR-binding peptide
  MOD_RES (2)..(4)..(41): Xaa is C or S
  MOD_RES (17)..(18)..(19)..(20)..(21): Xaa is A or G
  MOD_RES (22)..(23)..(24)..(25): Xaa is A or G or is absent

SEQ ID NO: 82834 - protein, 33 aa, Artificial Sequence; identical to SEQ ID NO: 51282
  GFR-binding peptide
  MOD_RES (31)..(32): Xaa is C or S

SEQ ID NO: 82835 - protein, 33 aa, Artificial Sequence; identical to SEQ ID NO: 51285
  GFR-binding peptide
  MOD_RES (1)..(1): Xaa is C or S
  MOD_RES (12)..(13)..(14)..(15)..(16): Xaa is A or G
  MOD_RES (17)..(18)..(19)..(20): Xaa is A or G or is absent

SEQ ID NO: 82836 - protein, 34 aa, Artificial Sequence; identical to SEQ ID NO: 18649
  GFR-binding peptide
  MOD_RES (34)..(34): Xaa is C or S
  MOD_RES (12)..(13)..(14)..(15)..(16): Xaa is A or G
  MOD_RES (17)..(18)..(19)..(20): Xaa is A or G or is absent

SEQ ID NO: 82837 - protein, 41 aa, Artificial Sequence; identical to SEQ ID NO: 17801
  GFR-binding peptide
  MOD_RES (1)..(3)..(40): Xaa is C or S

SEQ ID NO: 82838 - protein, 37 aa, Artificial Sequence; identical to SEQ ID NO: 17803
  GFR-binding peptide
  MOD_RES (34)..(34): Xaa is C or S

SEQ ID NO: 82839 - protein, 41 aa, Artificial Sequence; identical to SEQ ID NO: 18650
  GFR-binding peptide
  MOD_RES (2)..(4)..(38): Xaa is C or S
  MOD_RES (16)..(17)..(18)..(19)..(20): Xaa is A or G
  MOD_RES (21)..(22)..(23)..(24): Xaa is A or G or is absent

SEQ ID NO: 82840 - protein, 37 aa, Artificial Sequence; identical to SEQ ID NO: 17804
  GFR-binding peptide
  MOD_RES (1)..(35): Xaa is C or S

SEQ ID NO: 82841 - protein, 36 aa, Artificial Sequence; identical to SEQ ID NO: 51288
  GFR-binding peptide
  MOD_RES (1)..(3)..(36): Xaa is C or S
  MOD_RES (14)..(15)..(16)..(17)..(18): Xaa is A or G
  MOD_RES (19)..(20)..(21)..(22): Xaa is A or G or is absent

SEQ ID NO: 82842 - protein, 35 aa, Artificial Sequence; identical to SEQ ID NO: 18652
  GFR-binding peptide
  MOD_RES (1)..(35): Xaa is C or S
  MOD_RES (13)..(14)..(15)..(16)..(17): Xaa is A or G
  MOD_RES (18)..(19)..(20)..(21): Xaa is A or G or is absent

SEQ ID NO: 82843 - protein, 38 aa, Artificial Sequence; identical to SEQ ID NO: 18654
  GFR-binding peptide
  MOD_RES (1)..(35): Xaa is C or S
  MOD_RES (13)..(14)..(15)..(16)..(17): Xaa is A or G
  MOD_RES (18)..(19)..(20)..(21): Xaa is A or G or is absent

SEQ ID NO: 82844 - protein, 41 aa, Artificial Sequence; identical to SEQ ID NO: 50041
  GFR-binding peptide
  MOD_RES (2)..(35)..(36): Xaa is C or S
  MOD_RES (13)..(14)..(15)..(16)..(17): Xaa is A or G
  MOD_RES (18)..(19)..(20)..(21): Xaa is A or G or is absent

SEQ ID NO: 82845 - protein, 37 aa, Artificial Sequence; identical to SEQ ID NO: 17805
  GFR-binding peptide
  MOD_RES (2)..(4): Xaa is C or S

SEQ ID NO: 82846 - protein, 36 aa, Artificial Sequence; identical to SEQ ID NO: 47517
  GFR-binding peptide
  MOD_RES (1)..(3)..(36): Xaa is C or S
  MOD_RES (14)..(15)..(16)..(17)..(18): Xaa is A or G
  MOD_RES (19)..(20)..(21)..(22): Xaa is A or G or is absent

SEQ ID NO: 82847 - protein, 40 aa, Artificial Sequence; identical to SEQ ID NO: 18655
  GFR-binding peptide
  MOD_RES (36)..(36): Xaa is C or S

SEQ ID NO: 82848 - protein, 40 aa, Artificial Sequence; identical to SEQ ID NO: 50044
  GFR-binding peptide
  MOD_RES (2)..(35)..(36): Xaa is C or S
  MOD_RES (13)..(14)..(15)..(16)..(17): Xaa is A or G
  MOD_RES (18)..(19)..(20)..(21): Xaa is A or G or is absent

SEQ ID NO: 82849 - protein, 39 aa, Artificial Sequence; identical to SEQ ID NO: 47522
  GFR-binding peptide
  MOD_RES (1)..(3)..(34)..(35): Xaa is C or S

SEQ ID NO: 82850 - protein, 39 aa, Artificial Sequence; identical to SEQ ID NO: 50046
  GFR-binding peptide
  MOD_RES (1)..(3)..(36)..(37): Xaa is C or S
  MOD_RES (14)..(15)..(16)..(17)..(18): Xaa is A or G
  MOD_RES (19)..(20)..(21)..(22): Xaa is A or G or is absent

SEQ ID NO: 82851 - protein, 42 aa, Artificial Sequence; identical to SEQ ID NO: 48805
  GFR-binding peptide
  MOD_RES (1)..(3)..(36)..(37): Xaa is C or S
  MOD_RES (14)..(15)..(16)..(17)..(18): Xaa is A or G
  MOD_RES (19)..(20)..(21)..(22): Xaa is A or G or is absent

SEQ ID NO: 82852 - protein, 34 aa, Artificial Sequence; identical to SEQ ID NO: 17808
  GFR-binding peptide

SEQ ID NO: 82853 - protein, 37 aa, Artificial Sequence; identical to SEQ ID NO: 47527
  GFR-binding peptide
  MOD_RES (1)..(3)..(34)..(35): Xaa is C or S

SEQ ID NO: 82854 - protein, 37 aa, Artificial Sequence; identical to SEQ ID NO: 51303
  GFR-binding peptide
  MOD_RES (1)..(32)..(33): Xaa is C or S

SEQ ID NO: 82855 - protein, 41 aa, Artificial Sequence; identical to SEQ ID NO: 18661
  GFR-binding peptide
  MOD_RES (1)..(38): Xaa is C or S

SEQ ID NO: 82856 - protein, 36 aa, Artificial Sequence; identical to SEQ ID NO: 18663
  GFR-binding peptide
  MOD_RES (34)..(34): Xaa is C or S

SEQ ID NO: 82857 - protein, 38 aa, Artificial Sequence; identical to SEQ ID NO: 17813
  GFR-binding peptide
  MOD_RES (2)..(4)..(38): Xaa is C or S

SEQ ID NO: 82858 - protein, 40 aa, Artificial Sequence; identical to SEQ ID NO: 18665
  GFR-binding peptide
  MOD_RES (1)..(3)..(40): Xaa is C or S
  MOD_RES (16)..(17)..(18)..(19)..(20): Xaa is A or G
  MOD_RES (21)..(22)..(23)..(24): Xaa is A or G or is absent

SEQ ID NO: 82859 - protein, 43 aa, Artificial Sequence; identical to SEQ ID NO: 17815
  GFR-binding peptide
  MOD_RES (2)..(4)..(41): Xaa is C or S

SEQ ID NO: 82860 - protein, 42 aa, Artificial Sequence; identical to SEQ ID NO: 17816
  GFR-binding peptide
  MOD_RES (2)..(4)..(41): Xaa is C or S
  MOD_RES (17)..(18)..(19)..(20)..(21): Xaa is A or G
  MOD_RES (22)..(23)..(24)..(25): Xaa is A or G or is absent

SEQ ID NO: 82861 - protein, 40 aa, Artificial Sequence; identical to SEQ ID NO: 50060
  GFR-binding peptide
  MOD_RES (1)..(34)..(35): Xaa is C or S
  MOD_RES (12)..(13)..(14)..(15)..(16): Xaa is A or G
  MOD_RES (17)..(18)..(19)..(20): Xaa is A or G or is absent

SEQ ID NO: 82862 - protein, 37 aa, Artificial Sequence; identical to SEQ ID NO: 18667
  GFR-binding peptide
  MOD_RES (2)..(4): Xaa is C or S
  MOD_RES (16)..(17)..(18)..(19)..(20): Xaa is A or G
  MOD_RES (21)..(22)..(23)..(24): Xaa is A or G or is absent

SEQ ID NO: 82863 - protein, 41 aa, Artificial Sequence; identical to SEQ ID NO: 48816
  GFR-binding peptide
  MOD_RES (2)..(35)..(36): Xaa is C or S
  MOD_RES (13)..(14)..(15)..(16)..(17): Xaa is A or G
  MOD_RES (18)..(19)..(20)..(21): Xaa is A or G or is absent

SEQ ID NO: 82864 - protein, 38 aa, Artificial Sequence; identical to SEQ ID NO: 51311
  GFR-binding peptide
  MOD_RES (2)..(33)..(34): Xaa is C or S

SEQ ID NO: 82865 - protein, 34 aa, Artificial Sequence; identical to SEQ ID NO: 51312
  GFR-binding peptide
  MOD_RES (1)..(32)..(33): Xaa is C or S

SEQ ID NO: 82866 - protein, 39 aa, Artificial Sequence; identical to SEQ ID NO: 18668
  GFR-binding peptide
  MOD_RES (36)..(36): Xaa is C or S

SEQ ID NO: 82867 - protein, 32 aa, Artificial Sequence; identical to SEQ ID NO: 18669
  GFR-binding peptide
  MOD_RES (11)..(12)..(13)..(14)..(15): Xaa is A or G
  MOD_RES (16)..(17)..(18)..(19): Xaa is A or G or is absent

SEQ ID NO: 82868 - protein, 31 aa, Artificial Sequence; identical to SEQ ID NO: 48821
  GFR-binding peptide
  MOD_RES (31)..(31): Xaa is C or S

SEQ ID NO: 82869 - protein, 37 aa, Artificial Sequence; identical to SEQ ID NO: 18670
  GFR-binding peptide
  MOD_RES (1)..(3): Xaa is C or S
  MOD_RES (16)..(17)..(18)..(19)..(20): Xaa is A or G
  MOD_RES (21)..(22)..(23)..(24): Xaa is A or G or is absent

SEQ ID NO: 82870 - protein, 42 aa, Artificial Sequence; identical to SEQ ID NO: 17821
  GFR-binding peptide
  MOD_RES (1)..(38): Xaa is C or S
  MOD_RES (14)..(15)..(16)..(17)..(18): Xaa is A or G
  MOD_RES (19)..(20)..(21)..(22): Xaa is A or G or is absent

SEQ ID NO: 82871 - protein, 40 aa, Artificial Sequence; identical to SEQ ID NO: 18671
  GFR-binding peptide
  MOD_RES (1)..(3)..(37): Xaa is C or S
  MOD_RES (15)..(16)..(17)..(18)..(19): Xaa is A or G
  MOD_RES (20)..(21)..(22)..(23): Xaa is A or G or is absent

SEQ ID NO: 82872 - protein, 36 aa, Artificial Sequence; identical to SEQ ID NO: 50062
  GFR-binding peptide
  MOD_RES (1)..(3)..(34)..(35): Xaa is C or S

SEQ ID NO: 82873 - protein, 39 aa, Artificial Sequence; identical to SEQ ID NO: 17822
  GFR-binding peptide
  MOD_RES (2)..(39): Xaa is C or S

SEQ ID NO: 82874 - protein, 37 aa, Artificial Sequence; identical to SEQ ID NO: 51315
  GFR-binding peptide
  MOD_RES (1)..(3)..(34)..(35): Xaa is C or S

SEQ ID NO: 82875 - protein, 38 aa, Artificial Sequence; identical to SEQ ID NO: 17823
  GFR-binding peptide
  MOD_RES (1)..(38): Xaa is C or S
  MOD_RES (14)..(15)..(16)..(17)..(18): Xaa is A or G
  MOD_RES (19)..(20)..(21)..(22): Xaa is A or G or is absent

SEQ ID NO: 82876 - protein, 34 aa, Artificial Sequence; identical to SEQ ID NO: 18673
  GFR-binding peptide
  MOD_RES (1)..(1): Xaa is C or S
  MOD_RES (13)..(14)..(15)..(16)..(17): Xaa is A or G
  MOD_RES (18)..(19)..(20)..(21): Xaa is A or G or is absent

SEQ ID NO: 82877 - protein, 37 aa, Artificial Sequence; identical to SEQ ID NO: 47547
  GFR-binding peptide
  MOD_RES (2)..(4)..(35)..(36): Xaa is C or S

SEQ ID NO: 82878 - protein, 36 aa, Artificial Sequence; identical to SEQ ID NO: 50066
  GFR-binding peptide
  MOD_RES (1)..(34)..(35): Xaa is C or S
  MOD_RES (12)..(13)..(14)..(15)..(16): Xaa is A or G
  MOD_RES (17)..(18)..(19)..(20): Xaa is A or G or is absent

SEQ ID NO: 82879 - protein, 37 aa, Artificial Sequence; identical to SEQ ID NO: 51320
  GFR-binding peptide
  MOD_RES (1)..(3)..(34)..(35): Xaa is C or S

SEQ ID NO: 82880 - protein, 38 aa, Artificial Sequence; identical to SEQ ID NO: 18678
  GFR-binding peptide
  MOD_RES (1)..(3)..(37): Xaa is C or S
  MOD_RES (15)..(16)..(17)..(18)..(19): Xaa is A or G
  MOD_RES (20)..(21)..(22)..(23): Xaa is A or G or is absent

SEQ ID NO: 82881 - protein, 38 aa, Artificial Sequence; identical to SEQ ID NO: 17829
  GFR-binding peptide
  MOD_RES (1)..(38): Xaa is C or S
  MOD_RES (14)..(15)..(16)..(17)..(18): Xaa is A or G
  MOD_RES (19)..(20)..(21)..(22): Xaa is A or G or is absent

SEQ ID NO: 82882 - protein, 42 aa, Artificial Sequence; identical to SEQ ID NO: 17830
  GFR-binding peptide
  MOD_RES (2)..(39): Xaa is C or S

SEQ ID NO: 82883 - protein, 39 aa, Artificial Sequence; identical to SEQ ID NO: 18681
  GFR-binding peptide
  MOD_RES (2)..(36): Xaa is C or S
  MOD_RES (14)..(15)..(16)..(17)..(18): Xaa is A or G
  MOD_RES (19)..(20)..(21)..(22): Xaa is A or G or is absent

SEQ ID NO: 82884 - protein, 35 aa, Artificial Sequence; identical to SEQ ID NO: 51325
  GFR-binding peptide
  MOD_RES (2)..(33)..(34): Xaa is C or S

SEQ ID NO: 82885 - protein, 36 aa, Artificial Sequence; identical to SEQ ID NO: 18682
  GFR-binding peptide
  MOD_RES (36)..(36): Xaa is C or S
  MOD_RES (12)..(13)..(14)..(15)..(16): Xaa is A or G
  MOD_RES (17)..(18)..(19)..(20): Xaa is A or G or is absent

SEQ ID NO: 82886 - protein, 38 aa, Artificial Sequence; identical to SEQ ID NO: 51328
  GFR-binding peptide
  MOD_RES (1)..(32)..(33): Xaa is C or S

SEQ ID NO: 82887 - protein, 35 aa, Artificial Sequence; identical to SEQ ID NO: 50082
  GFR-binding peptide
  MOD_RES (1)..(34)..(35): Xaa is C or S
  MOD_RES (12)..(13)..(14)..(15)..(16): Xaa is A or G
  MOD_RES (17)..(18)..(19)..(20): Xaa is A or G or is absent

SEQ ID NO: 82888 - protein, 39 aa, Artificial Sequence; identical to SEQ ID NO: 17836
  GFR-binding peptide
  MOD_RES (34)..(34): Xaa is C or S
  MOD_RES (12)..(13)..(14)..(15)..(16): Xaa is A or G
  MOD_RES (17)..(18)..(19)..(20): Xaa is A or G or is absent

SEQ ID NO: 82889 - protein, 43 aa, Artificial Sequence; identical to SEQ ID NO: 51329
  GFR-binding peptide
  MOD_RES (2)..(4)..(37)..(38): Xaa is C or S
  MOD_RES (15)..(16)..(17)..(18)..(19): Xaa is A or G
  MOD_RES (20)..(21)..(22)..(23): Xaa is A or G or is absent

SEQ ID NO: 82890 - protein, 41 aa, Artificial Sequence; identical to SEQ ID NO: 18684
  GFR-binding peptide
  MOD_RES (2)..(36): Xaa is C or S
  MOD_RES (14)..(15)..(16)..(17)..(18): Xaa is A or G
  MOD_RES (19)..(20)..(21)..(22): Xaa is A or G or is absent

SEQ ID NO: 82891 - protein, 34 aa, Artificial Sequence; identical to SEQ ID NO: 18686
  GFR-binding peptide
  MOD_RES (1)..(1): Xaa is C or S

SEQ ID NO: 82892 - protein, 34 aa, Artificial Sequence; identical to SEQ ID NO: 48840
  GFR-binding peptide
  MOD_RES (1)..(34): Xaa is C or S
  MOD_RES (12)..(13)..(14)..(15)..(16): Xaa is A or G
  MOD_RES (17)..(18)..(19)..(20): Xaa is A or G or is absent

SEQ ID NO: 82893 - protein, 41 aa, Artificial Sequence; identical to SEQ ID NO: 18688
  GFR-binding peptide
  MOD_RES (1)..(3)..(37): Xaa is C or S
  MOD_RES (15)..(16)..(17)..(18)..(19): Xaa is A or G
  MOD_RES (20)..(21)..(22)..(23): Xaa is A or G or is absent

SEQ ID NO: 82894 - protein, 38 aa, Artificial Sequence; identical to SEQ ID NO: 47573
  GFR-binding peptide
  MOD_RES (2)..(4)..(37)..(38): Xaa is C or S
  MOD_RES (15)..(16)..(17)..(18)..(19): Xaa is A or G
  MOD_RES (20)..(21)..(22)..(23): Xaa is A or G or is absent

SEQ ID NO: 82895 - protein, 39 aa, Artificial Sequence; identical to SEQ ID NO: 17837
  GFR-binding peptide
  MOD_RES (2)..(4)..(38): Xaa is C or S

SEQ ID NO: 82896 - protein, 37 aa, Artificial Sequence; identical to SEQ ID NO: 51337
  GFR-binding peptide
  MOD_RES (2)..(33)..(34): Xaa is C or S

SEQ ID NO: 82897 - protein, 38 aa, Artificial Sequence; identical to SEQ ID NO: 51341
  GFR-binding peptide
  MOD_RES (2)..(4)..(37)..(38): Xaa is C or S
  MOD_RES (15)..(16)..(17)..(18)..(19): Xaa is A or G
  MOD_RES (20)..(21)..(22)..(23): Xaa is A or G or is absent

SEQ ID NO: 82898 - protein, 42 aa, Artificial Sequence; identical to SEQ ID NO: 50088
  GFR-binding peptide
  MOD_RES (2)..(4)..(37)..(38): Xaa is C or S
  MOD_RES (15)..(16)..(17)..(18)..(19): Xaa is A or G
  MOD_RES (20)..(21)..(22)..(23): Xaa is A or G or is absent

SEQ ID NO: 82899 - protein, 35 aa, Artificial Sequence; identical to SEQ ID NO: 47582
  GFR-binding peptide
  MOD_RES (2)..(33)..(34): Xaa is C or S

SEQ ID NO: 82900 - protein, 37 aa, Artificial Sequence; identical to SEQ ID NO: 18694
  GFR-binding peptide
  MOD_RES (1)..(35): Xaa is C or S

SEQ ID NO: 82901 - protein, 41 aa, Artificial Sequence; identical to SEQ ID NO: 18695
  GFR-binding peptide
  MOD_RES (1)..(35): Xaa is C or S
  MOD_RES (13)..(14)..(15)..(16)..(17): Xaa is A or G
  MOD_RES (18)..(19)..(20)..(21): Xaa is A or G or is absent

SEQ ID NO: 82902 - protein, 34 aa, Artificial Sequence; identical to SEQ ID NO: 48851
  GFR-binding peptide
  MOD_RES (2)..(4): Xaa is C or S

SEQ ID NO: 82903 - protein, 43 aa, Artificial Sequence; identical to SEQ ID NO: 18696
  GFR-binding peptide
  MOD_RES (2)..(39): Xaa is C or S

SEQ ID NO: 82904 - protein, 38 aa, Artificial Sequence; identical to SEQ ID NO: 47583
  GFR-binding peptide
  MOD_RES (1)..(3)..(34)..(35): Xaa is C or S

SEQ ID NO: 82905 - protein, 37 aa, Artificial Sequence; identical to SEQ ID NO: 17840
  GFR-binding peptide
  MOD_RES (2)..(36): Xaa is C or S
  MOD_RES (14)..(15)..(16)..(17)..(18): Xaa is A or G
  MOD_RES (19)..(20)..(21)..(22): Xaa is A or G or is absent

SEQ ID NO: 82906 - protein, 44 aa, Artificial Sequence; identical to SEQ ID NO: 17841
  GFR-binding peptide
  MOD_RES (2)..(4)..(38): Xaa is C or S
  MOD_RES (16)..(17)..(18)..(19)..(20): Xaa is A or G
  MOD_RES (21)..(22)..(23)..(24): Xaa is A or G or is absent

SEQ ID NO: 82907 - protein, 37 aa, Artificial Sequence; identical to SEQ ID NO: 18697
  GFR-binding peptide
  MOD_RES (1)..(35): Xaa is C or S
  MOD_RES (13)..(14)..(15)..(16)..(17): Xaa is A or G
  MOD_RES (18)..(19)..(20)..(21): Xaa is A or G or is absent

SEQ ID NO: 82908 - protein, 40 aa, Artificial Sequence; identical to SEQ ID NO: 51349
  GFR-binding peptide
  MOD_RES (2)..(4)..(37)..(38): Xaa is C or S
  MOD_RES (15)..(16)..(17)..(18)..(19): Xaa is A or G
  MOD_RES (20)..(21)..(22)..(23): Xaa is A or G or is absent

SEQ ID NO: 82909 - protein, 38 aa, Artificial Sequence; identical to SEQ ID NO: 18700
  GFR-binding peptide
  MOD_RES (35)..(35): Xaa is C or S
  MOD_RES (11)..(12)..(13)..(14)..(15): Xaa is A or G
  MOD_RES (16)..(17)..(18)..(19): Xaa is A or G or is absent

SEQ ID NO: 82910 - protein, 40 aa, Artificial Sequence; identical to SEQ ID NO: 17843
  GFR-binding peptide
  MOD_RES (37)..(37): Xaa is C or S

SEQ ID NO: 82911 - protein, 40 aa, Artificial Sequence; identical to SEQ ID NO: 18701
  GFR-binding peptide
  MOD_RES (2)..(4)..(38): Xaa is C or S
  MOD_RES (16)..(17)..(18)..(19)..(20): Xaa is A or G
  MOD_RES (21)..(22)..(23)..(24): Xaa is A or G or is absent

SEQ ID NO: 82912 - protein, 38 aa, Artificial Sequence; identical to SEQ ID NO: 18702
  GFR-binding peptide
  MOD_RES (2)..(2): Xaa is C or S
  MOD_RES (15)..(16)..(17)..(18)..(19): Xaa is A or G
  MOD_RES (20)..(21)..(22)..(23): Xaa is A or G or is absent

SEQ ID NO: 82913 - protein, 42 aa, Artificial Sequence; identical to SEQ ID NO: 18703
  GFR-binding peptide
  MOD_RES (7)..(41): Xaa is C or S
  MOD_RES (21)..(22)..(23)..(24)..(25): Xaa is A or G
  MOD_RES (26)..(27)..(28)..(29): Xaa is A or G or is absent

SEQ ID NO: 82914 - protein, 34 aa, Artificial Sequence; identical to SEQ ID NO: 19411
  GFR-binding peptide
  MOD_RES (14)..(15)..(16)..(17)..(18): Xaa is A or G
  MOD_RES (19)..(20)..(21)..(22): Xaa is A or G or is absent

SEQ ID NO: 82915 - protein, 41 aa, Artificial Sequence; identical to SEQ ID NO: 54943
  GFR-binding peptide
  MOD_RES (6)..(7)..(38)..(40): Xaa is C or S

SEQ ID NO: 82916 - protein, 36 aa, Artificial Sequence; identical to SEQ ID NO: 19412
  GFR-binding peptide
  MOD_RES (16)..(17)..(18)..(19)..(20): Xaa is A or G
  MOD_RES (21)..(22)..(23)..(24): Xaa is A or G or is absent

SEQ ID NO: 82917 - protein, 39 aa, Artificial Sequence; identical to SEQ ID NO: 53759
  GFR-binding peptide
  MOD_RES (6)..(7)..(38): Xaa is C or S

SEQ ID NO: 82918 - protein, 40 aa, Artificial Sequence; identical to SEQ ID NO: 19414
  GFR-binding peptide
  MOD_RES (1)..(38)..(40): Xaa is C or S
  MOD_RES (17)..(18)..(19)..(20)..(21): Xaa is A or G
  MOD_RES (22)..(23)..(24)..(25): Xaa is A or G or is absent

SEQ ID NO: 82919 - protein, 34 aa, Artificial Sequence; identical to SEQ ID NO: 51360
  GFR-binding peptide
  MOD_RES (1)..(32)..(34): Xaa is C or S

SEQ ID NO: 82920 - protein, 36 aa, Artificial Sequence; identical to SEQ ID NO: 54957
  GFR-binding peptide
  MOD_RES (1)..(2)..(35): Xaa is C or S
  MOD_RES (16)..(17)..(18)..(19)..(20): Xaa is A or G
  MOD_RES (21)..(22)..(23)..(24): Xaa is A or G or is absent

SEQ ID NO: 82921 - protein, 32 aa, Artificial Sequence; identical to SEQ ID NO: 53765
  GFR-binding peptide
  MOD_RES (14)..(15)..(16)..(17)..(18): Xaa is A or G
  MOD_RES (19)..(20)..(21)..(22): Xaa is A or G or is absent

SEQ ID NO: 82922 - protein, 36 aa, Artificial Sequence; identical to SEQ ID NO: 51370
  GFR-binding peptide
  MOD_RES (33)..(35): Xaa is C or S
  MOD_RES (14)..(15)..(16)..(17)..(18): Xaa is A or G
  MOD_RES (19)..(20)..(21)..(22): Xaa is A or G or is absent

SEQ ID NO: 82923 - protein, 41 aa, Artificial Sequence; identical to SEQ ID NO: 54966
  GFR-binding peptide
  MOD_RES (5)..(6)..(39)..(41): Xaa is C or S
  MOD_RES (20)..(21)..(22)..(23)..(24): Xaa is A or G
  MOD_RES (25)..(26)..(27)..(28): Xaa is A or G or is absent

SEQ ID NO: 82924 - protein, 39 aa, Artificial Sequence; identical to SEQ ID NO: 18712
  GFR-binding peptide
  MOD_RES (4)..(38): Xaa is C or S
  MOD_RES (18)..(19)..(20)..(21)..(22): Xaa is A or G
  MOD_RES (23)..(24)..(25)..(26): Xaa is A or G or is absent

SEQ ID NO: 82925 - protein, 41 aa, Artificial Sequence; identical to SEQ ID NO: 19420
  GFR-binding peptide
  MOD_RES (5)..(39)..(41): Xaa is C or S

SEQ ID NO: 82926 - protein, 36 aa, Artificial Sequence; identical to SEQ ID NO: 19421
  GFR-binding peptide
  MOD_RES (1)..(35): Xaa is C or S
  MOD_RES (15)..(16)..(17)..(18)..(19): Xaa is A or G
  MOD_RES (20)..(21)..(22)..(23): Xaa is A or G or is absent

SEQ ID NO: 82927 - protein, 36 aa, Artificial Sequence; identical to SEQ ID NO: 51377
  GFR-binding peptide
  MOD_RES (3)..(4)..(35): Xaa is C or S

SEQ ID NO: 82928 - protein, 32 aa, Artificial Sequence; identical to SEQ ID NO: 19422
  GFR-binding peptide

SEQ ID NO: 82929 - protein, 32 aa, Artificial Sequence; identical to SEQ ID NO: 18713
  GFR-binding peptide

SEQ ID NO: 82930 - protein, 42 aa, Artificial Sequence; identical to SEQ ID NO: 18714
  GFR-binding peptide
  MOD_RES (5)..(42): Xaa is C or S

SEQ ID NO: 82931 - protein, 40 aa, Artificial Sequence; identical to SEQ ID NO: 52600
  GFR-binding peptide
  MOD_RES (5)..(6)..(37)..(39): Xaa is C or S

SEQ ID NO: 82932 - protein, 34 aa, Artificial Sequence; identical to SEQ ID NO: 18715
  GFR-binding peptide
  MOD_RES (2)..(2): Xaa is C or S
  MOD_RES (16)..(17)..(18)..(19)..(20): Xaa is A or G
  MOD_RES (21)..(22)..(23)..(24): Xaa is A or G or is absent

SEQ ID NO: 82933 - protein, 35 aa, Artificial Sequence; identical to SEQ ID NO: 18716
  GFR-binding peptide
  MOD_RES (1)..(1): Xaa is C or S
  MOD_RES (17)..(18)..(19)..(20)..(21): Xaa is A or G
  MOD_RES (22)..(23)..(24)..(25): Xaa is A or G or is absent

SEQ ID NO: 82934 - protein, 43 aa, Artificial Sequence; identical to SEQ ID NO: 18718
  GFR-binding peptide
  MOD_RES (7)..(41)..(43): Xaa is C or S
  MOD_RES (21)..(22)..(23)..(24)..(25): Xaa is A or G
  MOD_RES (26)..(27)..(28)..(29): Xaa is A or G or is absent

SEQ ID NO: 82935 - protein, 33 aa, Artificial Sequence; identical to SEQ ID NO: 19425
  GFR-binding peptide
  MOD_RES (14)..(15)..(16)..(17)..(18): Xaa is A or G
  MOD_RES (19)..(20)..(21)..(22): Xaa is A or G or is absent

SEQ ID NO: 82936 - protein, 40 aa, Artificial Sequence; identical to SEQ ID NO: 19427
  GFR-binding peptide
  MOD_RES (1)..(38)..(40): Xaa is C or S
  MOD_RES (17)..(18)..(19)..(20)..(21): Xaa is A or G
  MOD_RES (22)..(23)..(24)..(25): Xaa is A or G or is absent

SEQ ID NO: 82937 - protein, 40 aa, Artificial Sequence; identical to SEQ ID NO: 18719
  GFR-binding peptide
  MOD_RES (7)..(7): Xaa is C or S
  MOD_RES (21)..(22)..(23)..(24)..(25): Xaa is A or G
  MOD_RES (26)..(27)..(28)..(29): Xaa is A or G or is absent

SEQ ID NO: 82938 - protein, 38 aa, Artificial Sequence; identical to SEQ ID NO: 18720
  GFR-binding peptide
  MOD_RES (2)..(2): Xaa is C or S
  MOD_RES (18)..(19)..(20)..(21)..(22): Xaa is A or G
  MOD_RES (23)..(24)..(25)..(26): Xaa is A or G or is absent

SEQ ID NO: 82939 - protein, 30 aa, Artificial Sequence; identical to SEQ ID NO: 51389
  GFR-binding peptide

SEQ ID NO: 82940 - protein, 41 aa, Artificial Sequence; identical to SEQ ID NO: 18721
  GFR-binding peptide
  MOD_RES (4)..(38)..(40): Xaa is C or S
  MOD_RES (18)..(19)..(20)..(21)..(22): Xaa is A or G
  MOD_RES (23)..(24)..(25)..(26): Xaa is A or G or is absent

SEQ ID NO: 82941 - protein, 36 aa, Artificial Sequence; identical to SEQ ID NO: 18722
  GFR-binding peptide
  MOD_RES (1)..(35): Xaa is C or S
  MOD_RES (15)..(16)..(17)..(18)..(19): Xaa is A or G
  MOD_RES (20)..(21)..(22)..(23): Xaa is A or G or is absent

SEQ ID NO: 82942 - protein, 40 aa, Artificial Sequence; identical to SEQ ID NO: 53796
  GFR-binding peptide
  MOD_RES (3)..(4)..(37)..(39): Xaa is C or S
  MOD_RES (18)..(19)..(20)..(21)..(22): Xaa is A or G
  MOD_RES (23)..(24)..(25)..(26): Xaa is A or G or is absent

SEQ ID NO: 82943 - protein, 43 aa, Artificial Sequence; identical to SEQ ID NO: 19429
  GFR-binding peptide
  MOD_RES (6)..(40)..(42): Xaa is C or S

SEQ ID NO: 82944 - protein, 33 aa, Artificial Sequence; identical to SEQ ID NO: 51395
  GFR-binding peptide
  MOD_RES (1)..(2)..(33): Xaa is C or S

SEQ ID NO: 82945 - protein, 35 aa, Artificial Sequence; identical to SEQ ID NO: 53799
  GFR-binding peptide
  MOD_RES (1)..(32)..(34): Xaa is C or S

SEQ ID NO: 82946 - protein, 36 aa, Artificial Sequence; identical to SEQ ID NO: 54988
  GFR-binding peptide
  MOD_RES (33)..(35): Xaa is C or S
  MOD_RES (14)..(15)..(16)..(17)..(18): Xaa is A or G
  MOD_RES (19)..(20)..(21)..(22): Xaa is A or G or is absent

SEQ ID NO: 82947 - protein, 40 aa, Artificial Sequence; identical to SEQ ID NO: 19433
  GFR-binding peptide
  MOD_RES (5)..(5): Xaa is C or S

SEQ ID NO: 82948 - protein, 36 aa, Artificial Sequence; identical to SEQ ID NO: 18727
  GFR-binding peptide
  MOD_RES (34)..(36): Xaa is C or S

SEQ ID NO: 82949 - protein, 38 aa, Artificial Sequence; identical to SEQ ID NO: 19434
  GFR-binding peptide
  MOD_RES (1)..(35)..(37): Xaa is C or S
  MOD_RES (15)..(16)..(17)..(18)..(19): Xaa is A or G
  MOD_RES (20)..(21)..(22)..(23): Xaa is A or G or is absent

SEQ ID NO: 82950 - protein, 39 aa, Artificial Sequence; identical to SEQ ID NO: 51398
  GFR-binding peptide
  MOD_RES (6)..(7)..(38): Xaa is C or S

SEQ ID NO: 82951 - protein, 34 aa, Artificial Sequence; identical to SEQ ID NO: 54992
  GFR-binding peptide
  MOD_RES (1)..(2)..(33): Xaa is C or S

SEQ ID NO: 82952 - protein, 35 aa, Artificial Sequence; identical to SEQ ID NO: 19435
  GFR-binding peptide

SEQ ID NO: 82953 - protein, 40 aa, Artificial Sequence; identical to SEQ ID NO: 18728
  GFR-binding peptide
  MOD_RES (2)..(39): Xaa is C or S
  MOD_RES (18)..(19)..(20)..(21)..(22): Xaa is A or G
  MOD_RES (23)..(24)..(25)..(26): Xaa is A or G or is absent

SEQ ID NO: 82954 - protein, 37 aa, Artificial Sequence; identical to SEQ ID NO: 18729
  GFR-binding peptide
  MOD_RES (4)..(4): Xaa is C or S
  MOD_RES (18)..(19)..(20)..(21)..(22): Xaa is A or G
  MOD_RES (23)..(24)..(25)..(26): Xaa is A or G or is absent

SEQ ID NO: 82955 - protein, 36 aa, Artificial Sequence; identical to SEQ ID NO: 19436
  GFR-binding peptide
  MOD_RES (2)..(2): Xaa is C or S

SEQ ID NO: 82956 - protein, 38 aa, Artificial Sequence; identical to SEQ ID NO: 19437
  GFR-binding peptide
  MOD_RES (1)..(35)..(37): Xaa is C or S
  MOD_RES (15)..(16)..(17)..(18)..(19): Xaa is A or G
  MOD_RES (20)..(21)..(22)..(23): Xaa is A or G or is absent

SEQ ID NO: 82957 - protein, 35 aa, Artificial Sequence; identical to SEQ ID NO: 54996
  GFR-binding peptide
  MOD_RES (3)..(4)..(35): Xaa is C or S

SEQ ID NO: 82958 - protein, 37 aa, Artificial Sequence; identical to SEQ ID NO: 18730
  GFR-binding peptide
  MOD_RES (2)..(2): Xaa is C or S
  MOD_RES (18)..(19)..(20)..(21)..(22): Xaa is A or G
  MOD_RES (23)..(24)..(25)..(26): Xaa is A or G or is absent

SEQ ID NO: 82959 - protein, 40 aa, Artificial Sequence; identical to SEQ ID NO: 18731
  GFR-binding peptide
  MOD_RES (37)..(39): Xaa is C or S
  MOD_RES (16)..(17)..(18)..(19)..(20): Xaa is A or G
  MOD_RES (21)..(22)..(23)..(24): Xaa is A or G or is absent

SEQ ID NO: 82960 - protein, 37 aa, Artificial Sequence; identical to SEQ ID NO: 18732
  GFR-binding peptide
  MOD_RES (1)..(1): Xaa is C or S

SEQ ID NO: 82961 - protein, 39 aa, Artificial Sequence; identical to SEQ ID NO: 52628
  GFR-binding peptide
  MOD_RES (3)..(4)..(37)..(39): Xaa is C or S
  MOD_RES (18)..(19)..(20)..(21)..(22): Xaa is A or G
  MOD_RES (23)..(24)..(25)..(26): Xaa is A or G or is absent

SEQ ID NO: 82962 - protein, 33 aa, Artificial Sequence; identical to SEQ ID NO: 55001
  GFR-binding peptide
  MOD_RES (1)..(2)..(33): Xaa is C or S

SEQ ID NO: 82963 - protein, 36 aa, Artificial Sequence; identical to SEQ ID NO: 18734
  GFR-binding peptide
  MOD_RES (35)..(35): Xaa is C or S
  MOD_RES (14)..(15)..(16)..(17)..(18): Xaa is A or G
  MOD_RES (19)..(20)..(21)..(22): Xaa is A or G or is absent

SEQ ID NO: 82964 - protein, 37 aa, Artificial Sequence; identical to SEQ ID NO: 19444
  GFR-binding peptide
  MOD_RES (35)..(37): Xaa is C or S

SEQ ID NO: 82965 - protein, 39 aa, Artificial Sequence; identical to SEQ ID NO: 19446
  GFR-binding peptide
  MOD_RES (1)..(38): Xaa is C or S
  MOD_RES (17)..(18)..(19)..(20)..(21): Xaa is A or G
  MOD_RES (22)..(23)..(24)..(25): Xaa is A or G or is absent

SEQ ID NO: 82966 - protein, 37 aa, Artificial Sequence; identical to SEQ ID NO: 19447
  GFR-binding peptide
  MOD_RES (36)..(36): Xaa is C or S
  MOD_RES (15)..(16)..(17)..(18)..(19): Xaa is A or G
  MOD_RES (20)..(21)..(22)..(23): Xaa is A or G or is absent

SEQ ID NO: 82967 - protein, 34 aa, Artificial Sequence; identical to SEQ ID NO: 18737
  GFR-binding peptide

SEQ ID NO: 82968 - protein, 39 aa, Artificial Sequence; identical to SEQ ID NO: 19448
  GFR-binding peptide
  MOD_RES (2)..(39): Xaa is C or S

SEQ ID NO: 82969 - protein, 37 aa, Artificial Sequence; identical to SEQ ID NO: 18738
  GFR-binding peptide
  MOD_RES (34)..(36): Xaa is C or S

SEQ ID NO: 82970 - protein, 37 aa, Artificial Sequence; identical to SEQ ID NO: 19450
  GFR-binding peptide
  MOD_RES (35)..(37): Xaa is C or S

SEQ ID NO: 82971 - protein, 38 aa, Artificial Sequence; identical to SEQ ID NO: 51421
  GFR-binding peptide
  MOD_RES (3)..(4)..(37): Xaa is C or S
  MOD_RES (18)..(19)..(20)..(21)..(22): Xaa is A or G
  MOD_RES (23)..(24)..(25)..(26): Xaa is A or G or is absent

SEQ ID NO: 82972 - protein, 34 aa, Artificial Sequence; identical to SEQ ID NO: 55012
  GFR-binding peptide
  MOD_RES (1)..(32)..(34): Xaa is C or S

SEQ ID NO: 82973 - protein, 37 aa, Artificial Sequence; identical to SEQ ID NO: 18740
  GFR-binding peptide
  MOD_RES (37)..(37): Xaa is C or S
  MOD_RES (16)..(17)..(18)..(19)..(20): Xaa is A or G
  MOD_RES (21)..(22)..(23)..(24): Xaa is A or G or is absent

SEQ ID NO: 82974 - protein, 43 aa, Artificial Sequence; identical to SEQ ID NO: 19451
  GFR-binding peptide
  MOD_RES (6)..(40)..(42): Xaa is C or S

SEQ ID NO: 82975 - protein, 37 aa, Artificial Sequence; identical to SEQ ID NO: 53826
  GFR-binding peptide
  MOD_RES (1)..(2)..(35)..(37): Xaa is C or S
  MOD_RES (16)..(17)..(18)..(19)..(20): Xaa is A or G
  MOD_RES (21)..(22)..(23)..(24): Xaa is A or G or is absent

SEQ ID NO: 82976 - protein, 32 aa, Artificial Sequence; identical to SEQ ID NO: 55014
  GFR-binding peptide
  MOD_RES (1)..(32): Xaa is C or S

SEQ ID NO: 82977 - protein, 33 aa, Artificial Sequence; identical to SEQ ID NO: 19453
  GFR-binding peptide
  MOD_RES (14)..(15)..(16)..(17)..(18): Xaa is A or G
  MOD_RES (19)..(20)..(21)..(22): Xaa is A or G or is absent

SEQ ID NO: 82978 - protein, 42 aa, Artificial Sequence; identical to SEQ ID NO: 19455
  GFR-binding peptide
  MOD_RES (5)..(42): Xaa is C or S
  MOD_RES (21)..(22)..(23)..(24)..(25): Xaa is A or G
  MOD_RES (26)..(27)..(28)..(29): Xaa is A or G or is absent

SEQ ID NO: 82979 - protein, 36 aa, Artificial Sequence; identical to SEQ ID NO: 55017
  GFR-binding peptide
  MOD_RES (1)..(2)..(35): Xaa is C or S
  MOD_RES (16)..(17)..(18)..(19)..(20): Xaa is A or G
  MOD_RES (21)..(22)..(23)..(24): Xaa is A or G or is absent

SEQ ID NO: 82980 - protein, 33 aa, Artificial Sequence; identical to SEQ ID NO: 51424
  GFR-binding peptide
  MOD_RES (31)..(33): Xaa is C or S

SEQ ID NO: 82981 - protein, 39 aa, Artificial Sequence; identical to SEQ ID NO: 19456
  GFR-binding peptide
  MOD_RES (7)..(7): Xaa is C or S
  MOD_RES (21)..(22)..(23)..(24)..(25): Xaa is A or G
  MOD_RES (26)..(27)..(28)..(29): Xaa is A or G or is absent

SEQ ID NO: 82982 - protein, 40 aa, Artificial Sequence; identical to SEQ ID NO: 18744
  GFR-binding peptide
  MOD_RES (4)..(38)..(40): Xaa is C or S
  MOD_RES (18)..(19)..(20)..(21)..(22): Xaa is A or G
  MOD_RES (23)..(24)..(25)..(26): Xaa is A or G or is absent

SEQ ID NO: 82983 - protein, 36 aa, Artificial Sequence; identical to SEQ ID NO: 53834
  GFR-binding peptide
  MOD_RES (3)..(4)..(35): Xaa is C or S

SEQ ID NO: 82984 - protein, 33 aa, Artificial Sequence; identical to SEQ ID NO: 55019
  GFR-binding peptide
  MOD_RES (31)..(33): Xaa is C or S

SEQ ID NO: 82985 - protein, 38 aa, Artificial Sequence; identical to SEQ ID NO: 19457
  GFR-binding peptide
  MOD_RES (1)..(38): Xaa is C or S

SEQ ID NO: 82986 - protein, 41 aa, Artificial Sequence; identical to SEQ ID NO: 18747
  GFR-binding peptide
  MOD_RES (7)..(41): Xaa is C or S
  MOD_RES (21)..(22)..(23)..(24)..(25): Xaa is A or G
  MOD_RES (26)..(27)..(28)..(29): Xaa is A or G or is absent

SEQ ID NO: 82987 - protein, 35 aa, Artificial Sequence; identical to SEQ ID NO: 51434
  GFR-binding peptide
  MOD_RES (1)..(2)..(33)..(35): Xaa is C or S

SEQ ID NO: 82988 - protein, 35 aa, Artificial Sequence; identical to SEQ ID NO: 52645
  GFR-binding peptide
  MOD_RES (1)..(2)..(33)..(35): Xaa is C or S

SEQ ID NO: 82989 - protein, 36 aa, Artificial Sequence; identical to SEQ ID NO: 18749
  GFR-binding peptide
  MOD_RES (4)..(4): Xaa is C or S
  MOD_RES (18)..(19)..(20)..(21)..(22): Xaa is A or G
  MOD_RES (23)..(24)..(25)..(26): Xaa is A or G or is absent

SEQ ID NO: 82990 - protein, 38 aa, Artificial Sequence; identical to SEQ ID NO: 18750
  GFR-binding peptide
  MOD_RES (3)..(37): Xaa is C or S

SEQ ID NO: 82991 - protein, 38 aa, Artificial Sequence; identical to SEQ ID NO: 18751
  GFR-binding peptide
  MOD_RES (37)..(37): Xaa is C or S

SEQ ID NO: 82992 - protein, 32 aa, Artificial Sequence; identical to SEQ ID NO: 19459
  GFR-binding peptide
  MOD_RES (14)..(15)..(16)..(17)..(18): Xaa is A or G
  MOD_RES (19)..(20)..(21)..(22): Xaa is A or G or is absent

SEQ ID NO: 82993 - protein, 39 aa, Artificial Sequence; identical to SEQ ID NO: 18754
  GFR-binding peptide
  MOD_RES (5)..(5): Xaa is C or S
  MOD_RES (21)..(22)..(23)..(24)..(25): Xaa is A or G
  MOD_RES (26)..(27)..(28)..(29): Xaa is A or G or is absent

SEQ ID NO: 82994 - protein, 38 aa, Artificial Sequence; identical to SEQ ID NO: 19461
  GFR-binding peptide
  MOD_RES (3)..(3): Xaa is C or S

SEQ ID NO: 82995 - protein, 42 aa, Artificial Sequence; identical to SEQ ID NO: 52649
  GFR-binding peptide
  MOD_RES (5)..(6)..(39)..(41): Xaa is C or S
  MOD_RES (20)..(21)..(22)..(23)..(24): Xaa is A or G
  MOD_RES (25)..(26)..(27)..(28): Xaa is A or G or is absent

SEQ ID NO: 82996 - protein, 38 aa, Artificial Sequence; identical to SEQ ID NO: 55032
  GFR-binding peptide
  MOD_RES (3)..(4)..(35)..(37): Xaa is C or S

SEQ ID NO: 82997 - protein, 44 aa, Artificial Sequence; identical to SEQ ID NO: 19466
  GFR-binding peptide
  MOD_RES (4)..(41)..(43): Xaa is C or S
  MOD_RES (20)..(21)..(22)..(23)..(24): Xaa is A or G
  MOD_RES (25)..(26)..(27)..(28): Xaa is A or G or is absent

SEQ ID NO: 82998 - protein, 39 aa, Artificial Sequence; identical to SEQ ID NO: 19467
  GFR-binding peptide
  MOD_RES (5)..(5): Xaa is C or S
  MOD_RES (21)..(22)..(23)..(24)..(25): Xaa is A or G
  MOD_RES (26)..(27)..(28)..(29): Xaa is A or G or is absent

SEQ ID NO: 82999 - protein, 43 aa, Artificial Sequence; identical to SEQ ID NO: 18756
  GFR-binding peptide
  MOD_RES (5)..(42): Xaa is C or S
  MOD_RES (21)..(22)..(23)..(24)..(25): Xaa is A or G
  MOD_RES (26)..(27)..(28)..(29): Xaa is A or G or is absent

SEQ ID NO: 83000 - protein, 40 aa, Artificial Sequence; identical to SEQ ID NO: 19468
  GFR-binding peptide
  MOD_RES (7)..(7): Xaa is C or S
  MOD_RES (21)..(22)..(23)..(24)..(25): Xaa is A or G
  MOD_RES (26)..(27)..(28)..(29): Xaa is A or G or is absent

SEQ ID NO: 83001 - protein, 42 aa, Artificial Sequence; identical to SEQ ID NO: 18757
  GFR-binding peptide
  MOD_RES (6)..(40)..(42): Xaa is C or S

SEQ ID NO: 83002 - protein, 34 aa, Artificial Sequence; identical to SEQ ID NO: 19469
  GFR-binding peptide
  MOD_RES (15)..(16)..(17)..(18)..(19): Xaa is A or G
  MOD_RES (20)..(21)..(22)..(23): Xaa is A or G or is absent

SEQ ID NO: 83003 - protein, 39 aa, Artificial Sequence; identical to SEQ ID NO: 19470
  GFR-binding peptide
  MOD_RES (7)..(7): Xaa is C or S

SEQ ID NO: 83004 - protein, 35 aa, Artificial Sequence; identical to SEQ ID NO: 18759
  GFR-binding peptide
  MOD_RES (15)..(16)..(17)..(18)..(19): Xaa is A or G
  MOD_RES (20)..(21)..(22)..(23): Xaa is A or G or is absent

SEQ ID NO: 83005 - protein, 35 aa, Artificial Sequence; identical to SEQ ID NO: 52661
  GFR-binding peptide
  MOD_RES (2)..(3): Xaa is C or S
  MOD_RES (17)..(18)..(19)..(20)..(21): Xaa is A or G
  MOD_RES (22)..(23)..(24)..(25): Xaa is A or G or is absent

SEQ ID NO: 83006 - protein, 42 aa, Artificial Sequence; identical to SEQ ID NO: 19471
  GFR-binding peptide
  MOD_RES (4)..(41): Xaa is C or S
  MOD_RES (20)..(21)..(22)..(23)..(24): Xaa is A or G
  MOD_RES (25)..(26)..(27)..(28): Xaa is A or G or is absent

SEQ ID NO: 83007 - protein, 35 aa, Artificial Sequence; identical to SEQ ID NO: 51452
  GFR-binding peptide
  MOD_RES (1)..(34): Xaa is C or S
  MOD_RES (15)..(16)..(17)..(18)..(19): Xaa is A or G
  MOD_RES (20)..(21)..(22)..(23): Xaa is A or G or is absent

SEQ ID NO: 83008 - protein, 37 aa, Artificial Sequence; identical to SEQ ID NO: 53863
  GFR-binding peptide
  MOD_RES (5)..(6)..(37): Xaa is C or S

SEQ ID NO: 83009 - protein, 38 aa, Artificial Sequence; identical to SEQ ID NO: 18760
  GFR-binding peptide
  MOD_RES (4)..(4): Xaa is C or S

SEQ ID NO: 83010 - protein, 37 aa, Artificial Sequence; identical to SEQ ID NO: 18761
  GFR-binding peptide
  MOD_RES (5)..(5): Xaa is C or S

SEQ ID NO: 83011 - protein, 38 aa, Artificial Sequence; identical to SEQ ID NO: 18762
  GFR-binding peptide
  MOD_RES (1)..(35)..(37): Xaa is C or S

SEQ ID NO: 83012 - protein, 32 aa, Artificial Sequence; identical to SEQ ID NO: 53869
  GFR-binding peptide
  MOD_RES (1)..(32): Xaa is C or S

SEQ ID NO: 83013 - protein, 37 aa, Artificial Sequence; identical to SEQ ID NO: 55044
  GFR-binding peptide
  MOD_RES (2)..(3)..(34)..(36): Xaa is C or S

SEQ ID NO: 83014 - protein, 40 aa, Artificial Sequence; identical to SEQ ID NO: 19473
  GFR-binding peptide
  MOD_RES (5)..(39): Xaa is C or S

SEQ ID NO: 83015 - protein, 39 aa, Artificial Sequence; identical to SEQ ID NO: 19474
  GFR-binding peptide
  MOD_RES (3)..(37)..(39): Xaa is C or S

SEQ ID NO: 83016 - protein, 37 aa, Artificial Sequence; identical to SEQ ID NO: 19475
  GFR-binding peptide
  MOD_RES (36)..(36): Xaa is C or S
  MOD_RES (15)..(16)..(17)..(18)..(19): Xaa is A or G
  MOD_RES (20)..(21)..(22)..(23): Xaa is A or G or is absent

SEQ ID NO: 83017 - protein, 35 aa, Artificial Sequence; identical to SEQ ID NO: 18765
  GFR-binding peptide
  MOD_RES (1)..(1): Xaa is C or S

SEQ ID NO: 83018 - protein, 34 aa, Artificial Sequence; identical to SEQ ID NO: 52671
  GFR-binding peptide
  MOD_RES (1)..(2)..(33): Xaa is C or S

SEQ ID NO: 83019 - protein, 41 aa, Artificial Sequence; identical to SEQ ID NO: 19478
  GFR-binding peptide
  MOD_RES (1)..(38)..(40): Xaa is C or S
  MOD_RES (17)..(18)..(19)..(20)..(21): Xaa is A or G
  MOD_RES (22)..(23)..(24)..(25): Xaa is A or G or is absent

SEQ ID NO: 83020 - protein, 38 aa, Artificial Sequence; identical to SEQ ID NO: 19479
  GFR-binding peptide
  MOD_RES (37)..(37): Xaa is C or S
  MOD_RES (16)..(17)..(18)..(19)..(20): Xaa is A or G
  MOD_RES (21)..(22)..(23)..(24): Xaa is A or G or is absent

SEQ ID NO: 83021 - protein, 38 aa, Artificial Sequence; identical to SEQ ID NO: 19480
  GFR-binding peptide
  MOD_RES (36)..(38): Xaa is C or S
  MOD_RES (15)..(16)..(17)..(18)..(19): Xaa is A or G
  MOD_RES (20)..(21)..(22)..(23): Xaa is A or G or is absent

SEQ ID NO: 83022 - protein, 35 aa, Artificial Sequence; identical to SEQ ID NO: 18767
  GFR-binding peptide
  MOD_RES (3)..(3): Xaa is C or S

SEQ ID NO: 83023 - protein, 40 aa, Artificial Sequence; identical to SEQ ID NO: 18768
  GFR-binding peptide
  MOD_RES (4)..(4): Xaa is C or S
  MOD_RES (20)..(21)..(22)..(23)..(24): Xaa is A or G
  MOD_RES (25)..(26)..(27)..(28): Xaa is A or G or is absent

SEQ ID NO: 83024 - protein, 41 aa, Artificial Sequence; identical to SEQ ID NO: 19481
  GFR-binding peptide
  MOD_RES (4)..(41): Xaa is C or S
  MOD_RES (20)..(21)..(22)..(23)..(24): Xaa is A or G
  MOD_RES (25)..(26)..(27)..(28): Xaa is A or G or is absent

SEQ ID NO: 83025 - protein, 37 aa, Artificial Sequence; identical to SEQ ID NO: 19482
  GFR-binding peptide
  MOD_RES (4)..(4): Xaa is C or S
  MOD_RES (18)..(19)..(20)..(21)..(22): Xaa is A or G
  MOD_RES (23)..(24)..(25)..(26): Xaa is A or G or is absent

SEQ ID NO: 83026 - protein, 38 aa, Artificial Sequence; identical to SEQ ID NO: 18771
  GFR-binding peptide
  MOD_RES (1)..(35)..(37): Xaa is C or S

SEQ ID NO: 83027 - protein, 38 aa, Artificial Sequence; identical to SEQ ID NO: 51462
  GFR-binding peptide
  MOD_RES (6)..(7)..(38): Xaa is C or S

SEQ ID NO: 83028 - protein, 36 aa, Artificial Sequence; identical to SEQ ID NO: 55053
  GFR-binding peptide
  MOD_RES (4)..(5)..(36): Xaa is C or S

SEQ ID NO: 83029 - protein, 39 aa, Artificial Sequence; identical to SEQ ID NO: 19485
  GFR-binding peptide
  MOD_RES (3)..(37)..(39): Xaa is C or S

SEQ ID NO: 83030 - protein, 38 aa, Artificial Sequence; identical to SEQ ID NO: 19486
  GFR-binding peptide
  MOD_RES (6)..(6): Xaa is C or S

SEQ ID NO: 83031 - protein, 41 aa, Artificial Sequence; identical to SEQ ID NO: 19489
  GFR-binding peptide
  MOD_RES (6)..(40): Xaa is C or S

SEQ ID NO: 83032 - protein, 36 aa, Artificial Sequence; identical to SEQ ID NO: 55057
  GFR-binding peptide
  MOD_RES (2)..(3)..(36): Xaa is C or S
  MOD_RES (17)..(18)..(19)..(20)..(21): Xaa is A or G
  MOD_RES (22)..(23)..(24)..(25): Xaa is A or G or is absent

SEQ ID NO: 83033 - protein, 34 aa, Artificial Sequence; identical to SEQ ID NO: 19490
  GFR-binding peptide
  MOD_RES (16)..(17)..(18)..(19)..(20): Xaa is A or G
  MOD_RES (21)..(22)..(23)..(24): Xaa is A or G or is absent

SEQ ID NO: 83034 - protein, 42 aa, Artificial Sequence; identical to SEQ ID NO: 18774
  GFR-binding peptide
  MOD_RES (5)..(39)..(41): Xaa is C or S
  MOD_RES (19)..(20)..(21)..(22)..(23): Xaa is A or G
  MOD_RES (24)..(25)..(26)..(27): Xaa is A or G or is absent

SEQ ID NO: 83035 - protein, 41 aa, Artificial Sequence; identical to SEQ ID NO: 19491
  GFR-binding peptide
  MOD_RES (1)..(38)..(40): Xaa is C or S
  MOD_RES (17)..(18)..(19)..(20)..(21): Xaa is A or G
  MOD_RES (22)..(23)..(24)..(25): Xaa is A or G or is absent

SEQ ID NO: 83036 - protein, 36 aa, Artificial Sequence; identical to SEQ ID NO: 19492
  GFR-binding peptide
  MOD_RES (34)..(36): Xaa is C or S

SEQ ID NO: 83037 - protein, 40 aa, Artificial Sequence; identical to SEQ ID NO: 19494
  GFR-binding peptide
  MOD_RES (3)..(40): Xaa is C or S
  MOD_RES (19)..(20)..(21)..(22)..(23): Xaa is A or G
  MOD_RES (24)..(25)..(26)..(27): Xaa is A or G or is absent

SEQ ID NO: 83038 - protein, 40 aa, Artificial Sequence; identical to SEQ ID NO: 51470
  GFR-binding peptide
  MOD_RES (6)..(7)..(38)..(40): Xaa is C or S

SEQ ID NO: 83039 - protein, 41 aa, Artificial Sequence; identical to SEQ ID NO: 18779
  GFR-binding peptide
  MOD_RES (4)..(38)..(40): Xaa is C or S
  MOD_RES (18)..(19)..(20)..(21)..(22): Xaa is A or G
  MOD_RES (23)..(24)..(25)..(26): Xaa is A or G or is absent

SEQ ID NO: 83040 - protein, 34 aa, Artificial Sequence; identical to SEQ ID NO: 55063
  GFR-binding peptide
  MOD_RES (1)..(32)..(34): Xaa is C or S

SEQ ID NO: 83041 - protein, 36 aa, Artificial Sequence; identical to SEQ ID NO: 55067
  GFR-binding peptide
  MOD_RES (33)..(35): Xaa is C or S
  MOD_RES (14)..(15)..(16)..(17)..(18): Xaa is A or G
  MOD_RES (19)..(20)..(21)..(22): Xaa is A or G or is absent

SEQ ID NO: 83042 - protein, 35 aa, Artificial Sequence; identical to SEQ ID NO: 18780
  GFR-binding peptide
  MOD_RES (2)..(2): Xaa is C or S
  MOD_RES (16)..(17)..(18)..(19)..(20): Xaa is A or G
  MOD_RES (21)..(22)..(23)..(24): Xaa is A or G or is absent

SEQ ID NO: 83043 - protein, 39 aa, Artificial Sequence; identical to SEQ ID NO: 19495
  GFR-binding peptide
  MOD_RES (4)..(4): Xaa is C or S
  MOD_RES (20)..(21)..(22)..(23)..(24): Xaa is A or G
  MOD_RES (25)..(26)..(27)..(28): Xaa is A or G or is absent

SEQ ID NO: 83044 - protein, 41 aa, Artificial Sequence; identical to SEQ ID NO: 53897
  GFR-binding peptide
  MOD_RES (4)..(5)..(38)..(40): Xaa is C or S
  MOD_RES (19)..(20)..(21)..(22)..(23): Xaa is A or G
  MOD_RES (24)..(25)..(26)..(27): Xaa is A or G or is absent

SEQ ID NO: 83045 - protein, 32 aa, Artificial Sequence; identical to SEQ ID NO: 19496
  GFR-binding peptide
  MOD_RES (14)..(15)..(16)..(17)..(18): Xaa is A or G
  MOD_RES (19)..(20)..(21)..(22): Xaa is A or G or is absent

SEQ ID NO: 83046 - protein, 36 aa, Artificial Sequence; identical to SEQ ID NO: 51473
  GFR-binding peptide
  MOD_RES (1)..(2)..(35): Xaa is C or S
  MOD_RES (16)..(17)..(18)..(19)..(20): Xaa is A or G
  MOD_RES (21)..(22)..(23)..(24): Xaa is A or G or is absent

SEQ ID NO: 83047 - protein, 33 aa, Artificial Sequence; identical to SEQ ID NO: 18784
  GFR-binding peptide

SEQ ID NO: 83048 - protein, 37 aa, Artificial Sequence; identical to SEQ ID NO: 52706
  GFR-binding peptide
  MOD_RES (4)..(5): Xaa is C or S
  MOD_RES (19)..(20)..(21)..(22)..(23): Xaa is A or G
  MOD_RES (24)..(25)..(26)..(27): Xaa is A or G or is absent

SEQ ID NO: 83049 - protein, 40 aa, Artificial Sequence; identical to SEQ ID NO: 19498
  GFR-binding peptide
  MOD_RES (4)..(4): Xaa is C or S
  MOD_RES (20)..(21)..(22)..(23)..(24): Xaa is A or G
  MOD_RES (25)..(26)..(27)..(28): Xaa is A or G or is absent

SEQ ID NO: 83050 - protein, 39 aa, Artificial Sequence; identical to SEQ ID NO: 51477
  GFR-binding peptide
  MOD_RES (4)..(5)..(36)..(38): Xaa is C or S

SEQ ID NO: 83051 - protein, 40 aa, Artificial Sequence; identical to SEQ ID NO: 19499
  GFR-binding peptide
  MOD_RES (4)..(38)..(40): Xaa is C or S
  MOD_RES (18)..(19)..(20)..(21)..(22): Xaa is A or G
  MOD_RES (23)..(24)..(25)..(26): Xaa is A or G or is absent

SEQ ID NO: 83052 - protein, 35 aa, Artificial Sequence; identical to SEQ ID NO: 52709
  GFR-binding peptide
  MOD_RES (1)..(2)..(33)..(35): Xaa is C or S

SEQ ID NO: 83053 - protein, 42 aa, Artificial Sequence; identical to SEQ ID NO: 19501
  GFR-binding peptide
  MOD_RES (4)..(41): Xaa is C or S

SEQ ID NO: 83054 - protein, 40 aa, Artificial Sequence; identical to SEQ ID NO: 19502
  GFR-binding peptide
  MOD_RES (5)..(39): Xaa is C or S

SEQ ID NO: 83055 - protein, 34 aa, Artificial Sequence; identical to SEQ ID NO: 52710
  GFR-binding peptide
  MOD_RES (3)..(4): Xaa is C or S

SEQ ID NO: 83056 - protein, 36 aa, Artificial Sequence; identical to SEQ ID NO: 18785
  GFR-binding peptide
  MOD_RES (3)..(3): Xaa is C or S
  MOD_RES (17)..(18)..(19)..(20)..(21): Xaa is A or G
  MOD_RES (22)..(23)..(24)..(25): Xaa is A or G or is absent

SEQ ID NO: 83057 - protein, 39 aa, Artificial Sequence; identical to SEQ ID NO: 52711
  GFR-binding peptide
  MOD_RES (3)..(4)..(37)..(39): Xaa is C or S
  MOD_RES (18)..(19)..(20)..(21)..(22): Xaa is A or G
  MOD_RES (23)..(24)..(25)..(26): Xaa is A or G or is absent

SEQ ID NO: 83058 - protein, 36 aa, Artificial Sequence; identical to SEQ ID NO: 55081
  GFR-binding peptide
  MOD_RES (3)..(4)..(35): Xaa is C or S

SEQ ID NO: 83059 - protein, 37 aa, Artificial Sequence; identical to SEQ ID NO: 53900
  GFR-binding peptide
  MOD_RES (2)..(3)..(34)..(36): Xaa is C or S

SEQ ID NO: 83060 - protein, 35 aa, Artificial Sequence; identical to SEQ ID NO: 18787
  GFR-binding peptide

SEQ ID NO: 83061 - protein, 39 aa, Artificial Sequence; identical to SEQ ID NO: 18788
  GFR-binding peptide
  MOD_RES (3)..(37)..(39): Xaa is C or S

SEQ ID NO: 83062 - protein, 38 aa, Artificial Sequence; identical to SEQ ID NO: 52714
  GFR-binding peptide
  MOD_RES (4)..(5)..(38): Xaa is C or S
  MOD_RES (19)..(20)..(21)..(22)..(23): Xaa is A or G
  MOD_RES (24)..(25)..(26)..(27): Xaa is A or G or is absent

SEQ ID NO: 83063 - protein, 42 aa, Artificial Sequence; identical to SEQ ID NO: 19504
  GFR-binding peptide
  MOD_RES (2)..(39)..(41): Xaa is C or S

SEQ ID NO: 83064 - protein, 41 aa, Artificial Sequence; identical to SEQ ID NO: 18789
  GFR-binding peptide
  MOD_RES (5)..(5): Xaa is C or S

SEQ ID NO: 83065 - protein, 35 aa, Artificial Sequence; identical to SEQ ID NO: 18790
  GFR-binding peptide
  MOD_RES (34)..(34): Xaa is C or S

SEQ ID NO: 83066 - protein, 34 aa, Artificial Sequence; identical to SEQ ID NO: 19506
  GFR-binding peptide
  MOD_RES (1)..(1): Xaa is C or S

SEQ ID NO: 83067 - protein, 39 aa, Artificial Sequence; identical to SEQ ID NO: 19507
  GFR-binding peptide
  MOD_RES (36)..(38): Xaa is C or S
  MOD_RES (15)..(16)..(17)..(18)..(19): Xaa is A or G
  MOD_RES (20)..(21)..(22)..(23): Xaa is A or G or is absent

SEQ ID NO: 83068 - protein, 37 aa, Artificial Sequence; identical to SEQ ID NO: 18791
  GFR-binding peptide
  MOD_RES (2)..(36): Xaa is C or S
  MOD_RES (16)..(17)..(18)..(19)..(20): Xaa is A or G
  MOD_RES (21)..(22)..(23)..(24): Xaa is A or G or is absent

SEQ ID NO: 83069 - protein, 38 aa, Artificial Sequence; identical to SEQ ID NO: 18792
  GFR-binding peptide
  MOD_RES (2)..(2): Xaa is C or S
  MOD_RES (18)..(19)..(20)..(21)..(22): Xaa is A or G
  MOD_RES (23)..(24)..(25)..(26): Xaa is A or G or is absent

SEQ ID NO: 83070 - protein, 34 aa, Artificial Sequence; identical to SEQ ID NO: 18794
  GFR-binding peptide
  MOD_RES (16)..(17)..(18)..(19)..(20): Xaa is A or G
  MOD_RES (21)..(22)..(23)..(24): Xaa is A or G or is absent

SEQ ID NO: 83071 - protein, 44 aa, Artificial Sequence; identical to SEQ ID NO: 19511
  GFR-binding peptide
  MOD_RES (5)..(42)..(44): Xaa is C or S

SEQ ID NO: 83072 - protein, 38 aa, Artificial Sequence; identical to SEQ ID NO: 19512
  GFR-binding peptide
  MOD_RES (35)..(37): Xaa is C or S
  MOD_RES (14)..(15)..(16)..(17)..(18): Xaa is A or G
  MOD_RES (19)..(20)..(21)..(22): Xaa is A or G or is absent

SEQ ID NO: 83073 - protein, 42 aa, Artificial Sequence; identical to SEQ ID NO: 18796
  GFR-binding peptide
  MOD_RES (5)..(39)..(41): Xaa is C or S
  MOD_RES (19)..(20)..(21)..(22)..(23): Xaa is A or G
  MOD_RES (24)..(25)..(26)..(27): Xaa is A or G or is absent

SEQ ID NO: 83074 - protein, 40 aa, Artificial Sequence; identical to SEQ ID NO: 51508
  GFR-binding peptide
  MOD_RES (6)..(7)..(40): Xaa is C or S
  MOD_RES (21)..(22)..(23)..(24)..(25): Xaa is A or G
  MOD_RES (26)..(27)..(28)..(29): Xaa is A or G or is absent

SEQ ID NO: 83075 - protein, 35 aa, Artificial Sequence; identical to SEQ ID NO: 53913
  GFR-binding peptide
  MOD_RES (2)..(3): Xaa is C or S
  MOD_RES (17)..(18)..(19)..(20)..(21): Xaa is A or G
  MOD_RES (22)..(23)..(24)..(25): Xaa is A or G or is absent

SEQ ID NO: 83076 - protein, 38 aa, Artificial Sequence; identical to SEQ ID NO: 19514
  GFR-binding peptide
  MOD_RES (36)..(38): Xaa is C or S
  MOD_RES (15)..(16)..(17)..(18)..(19): Xaa is A or G
  MOD_RES (20)..(21)..(22)..(23): Xaa is A or G or is absent

SEQ ID NO: 83077 - protein, 39 aa, Artificial Sequence; identical to SEQ ID NO: 19518
  GFR-binding peptide
  MOD_RES (5)..(5): Xaa is C or S

SEQ ID NO: 83078 - protein, 38 aa, Artificial Sequence; identical to SEQ ID NO: 18798
  GFR-binding peptide
  MOD_RES (6)..(6): Xaa is C or S
  MOD_RES (20)..(21)..(22)..(23)..(24): Xaa is A or G
  MOD_RES (25)..(26)..(27)..(28): Xaa is A or G or is absent

SEQ ID NO: 83079 - protein, 36 aa, Artificial Sequence; identical to SEQ ID NO: 19520
  GFR-binding peptide
  MOD_RES (34)..(36): Xaa is C or S
  MOD_RES (14)..(15)..(16)..(17)..(18): Xaa is A or G
  MOD_RES (19)..(20)..(21)..(22): Xaa is A or G or is absent

SEQ ID NO: 83080 - protein, 37 aa, Artificial Sequence; identical to SEQ ID NO: 52733
  GFR-binding peptide
  MOD_RES (2)..(3)..(36): Xaa is C or S
  MOD_RES (17)..(18)..(19)..(20)..(21): Xaa is A or G
  MOD_RES (22)..(23)..(24)..(25): Xaa is A or G or is absent

SEQ ID NO: 83081 - protein, 38 aa, Artificial Sequence; identical to SEQ ID NO: 19522
  GFR-binding peptide
  MOD_RES (5)..(5): Xaa is C or S
  MOD_RES (19)..(20)..(21)..(22)..(23): Xaa is A or G
  MOD_RES (24)..(25)..(26)..(27): Xaa is A or G or is absent

SEQ ID NO: 83082 - protein, 42 aa, Artificial Sequence; identical to SEQ ID NO: 52736
  GFR-binding peptide
  MOD_RES (6)..(7)..(40)..(42): Xaa is C or S
  MOD_RES (21)..(22)..(23)..(24)..(25): Xaa is A or G
  MOD_RES (26)..(27)..(28)..(29): Xaa is A or G or is absent

SEQ ID NO: 83083 - protein, 36 aa, Artificial Sequence; identical to SEQ ID NO: 18801
  GFR-binding peptide
  MOD_RES (2)..(36): Xaa is C or S

SEQ ID NO: 83084 - protein, 33 aa, Artificial Sequence; identical to SEQ ID NO: 53918
  GFR-binding peptide
  MOD_RES (1)..(1): Xaa is C or S
  MOD_RES (15)..(16)..(17)..(18)..(19): Xaa is A or G
  MOD_RES (20)..(21)..(22)..(23): Xaa is A or G or is absent

SEQ ID NO: 83085 - protein, 37 aa, Artificial Sequence; identical to SEQ ID NO: 18802
  GFR-binding peptide
  MOD_RES (1)..(1): Xaa is C or S

SEQ ID NO: 83086 - protein, 35 aa, Artificial Sequence; identical to SEQ ID NO: 51526
  GFR-binding peptide
  MOD_RES (2)..(3): Xaa is C or S
  MOD_RES (17)..(18)..(19)..(20)..(21): Xaa is A or G
  MOD_RES (22)..(23)..(24)..(25): Xaa is A or G or is absent

SEQ ID NO: 83087 - protein, 41 aa, Artificial Sequence; identical to SEQ ID NO: 55114
  GFR-binding peptide
  MOD_RES (5)..(6)..(39)..(41): Xaa is C or S
  MOD_RES (20)..(21)..(22)..(23)..(24): Xaa is A or G
  MOD_RES (25)..(26)..(27)..(28): Xaa is A or G or is absent

SEQ ID NO: 83088 - protein, 40 aa, Artificial Sequence; identical to SEQ ID NO: 18803
  GFR-binding peptide
  MOD_RES (3)..(40): Xaa is C or S

SEQ ID NO: 83089 - protein, 33 aa, Artificial Sequence; identical to SEQ ID NO: 55117
  GFR-binding peptide
  MOD_RES (1)..(2)..(33): Xaa is C or S

SEQ ID NO: 83090 - protein, 45 aa, Artificial Sequence; identical to SEQ ID NO: 18804
  GFR-binding peptide
  MOD_RES (5)..(42)..(44): Xaa is C or S
  MOD_RES (21)..(22)..(23)..(24)..(25): Xaa is A or G
  MOD_RES (26)..(27)..(28)..(29): Xaa is A or G or is absent

SEQ ID NO: 83091 - protein, 43 aa, Artificial Sequence; identical to SEQ ID NO: 19524
  GFR-binding peptide
  MOD_RES (4)..(41)..(43): Xaa is C or S

SEQ ID NO: 83092 - protein, 41 aa, Artificial Sequence; identical to SEQ ID NO: 19525
  GFR-binding peptide
  MOD_RES (2)..(39)..(41): Xaa is C or S
  MOD_RES (18)..(19)..(20)..(21)..(22): Xaa is A or G
  MOD_RES (23)..(24)..(25)..(26): Xaa is A or G or is absent

SEQ ID NO: 83093 - protein, 34 aa, Artificial Sequence; identical to SEQ ID NO: 19526
  GFR-binding peptide
  MOD_RES (34)..(34): Xaa is C or S

SEQ ID NO: 83094 - protein, 38 aa, Artificial Sequence; identical to SEQ ID NO: 53926
  GFR-binding peptide
  MOD_RES (2)..(3)..(36)..(38): Xaa is C or S
  MOD_RES (17)..(18)..(19)..(20)..(21): Xaa is A or G
  MOD_RES (22)..(23)..(24)..(25): Xaa is A or G or is absent

SEQ ID NO: 83095 - protein, 43 aa, Artificial Sequence; identical to SEQ ID NO: 18805
  GFR-binding peptide
  MOD_RES (6)..(40)..(42): Xaa is C or S

SEQ ID NO: 83096 - protein, 41 aa, Artificial Sequence; identical to SEQ ID NO: 53929
  GFR-binding peptide
  MOD_RES (6)..(7)..(40): Xaa is C or S
  MOD_RES (21)..(22)..(23)..(24)..(25): Xaa is A or G
  MOD_RES (26)..(27)..(28)..(29): Xaa is A or G or is absent

SEQ ID NO: 83097 - protein, 39 aa, Artificial Sequence; identical to SEQ ID NO: 18806
  GFR-binding peptide
  MOD_RES (37)..(39): Xaa is C or S
  MOD_RES (16)..(17)..(18)..(19)..(20): Xaa is A or G
  MOD_RES (21)..(22)..(23)..(24): Xaa is A or G or is absent

SEQ ID NO: 83098 - protein, 41 aa, Artificial Sequence; identical to SEQ ID NO: 19527
  GFR-binding peptide
  MOD_RES (6)..(40): Xaa is C or S
  MOD_RES (20)..(21)..(22)..(23)..(24): Xaa is A or G
  MOD_RES (25)..(26)..(27)..(28): Xaa is A or G or is absent

SEQ ID NO: 83099 - protein, 37 aa, Artificial Sequence; identical to SEQ ID NO: 19528
  GFR-binding peptide
  MOD_RES (3)..(3): Xaa is C or S
  MOD_RES (19)..(20)..(21)..(22)..(23): Xaa is A or G
  MOD_RES (24)..(25)..(26)..(27): Xaa is A or G or is absent

SEQ ID NO: 83100 - protein, 35 aa, Artificial Sequence; identical to SEQ ID NO: 52751
  GFR-binding peptide
  MOD_RES (2)..(3)..(34): Xaa is C or S

SEQ ID NO: 83101 - protein, 37 aa, Artificial Sequence; identical to SEQ ID NO: 53932
  GFR-binding peptide
  MOD_RES (2)..(3)..(36): Xaa is C or S
  MOD_RES (17)..(18)..(19)..(20)..(21): Xaa is A or G
  MOD_RES (22)..(23)..(24)..(25): Xaa is A or G or is absent

SEQ ID NO: 83102 - protein, 40 aa, Artificial Sequence; identical to SEQ ID NO: 18808
  GFR-binding peptide
  MOD_RES (2)..(39): Xaa is C or S

SEQ ID NO: 83103 - protein, 35 aa, Artificial Sequence; identical to SEQ ID NO: 18809
  GFR-binding peptide
  MOD_RES (2)..(2): Xaa is C or S

SEQ ID NO: 83104 - protein, 41 aa, Artificial Sequence; identical to SEQ ID NO: 19530
  GFR-binding peptide
  MOD_RES (5)..(39)..(41): Xaa is C or S

SEQ ID NO: 83105 - protein, 40 aa, Artificial Sequence; identical to SEQ ID NO: 51534
  GFR-binding peptide
  MOD_RES (6)..(7)..(38)..(40): Xaa is C or S

SEQ ID NO: 83106 - protein, 39 aa, Artificial Sequence; identical to SEQ ID NO: 19531
  GFR-binding peptide
  MOD_RES (6)..(6): Xaa is C or S

SEQ ID NO: 83107 - protein, 42 aa, Artificial Sequence; identical to SEQ ID NO: 52757
  GFR-binding peptide
  MOD_RES (6)..(7)..(40)..(42): Xaa is C or S
  MOD_RES (21)..(22)..(23)..(24)..(25): Xaa is A or G
  MOD_RES (26)..(27)..(28)..(29): Xaa is A or G or is absent

SEQ ID NO: 83108 - protein, 35 aa, Artificial Sequence; identical to SEQ ID NO: 18812
  GFR-binding peptide

SEQ ID NO: 83109 - protein, 32 aa, Artificial Sequence; identical to SEQ ID NO: 53943
  GFR-binding peptide
  MOD_RES (1)..(32): Xaa is C or S

SEQ ID NO: 83110 - protein, 37 aa, Artificial Sequence; identical to SEQ ID NO: 19533
  GFR-binding peptide
  MOD_RES (3)..(3): Xaa is C or S
  MOD_RES (19)..(20)..(21)..(22)..(23): Xaa is A or G
  MOD_RES (24)..(25)..(26)..(27): Xaa is A or G or is absent

SEQ ID NO: 83111 - protein, 39 aa, Artificial Sequence; identical to SEQ ID NO: 19534
  GFR-binding peptide
  MOD_RES (1)..(38): Xaa is C or S
  MOD_RES (17)..(18)..(19)..(20)..(21): Xaa is A or G
  MOD_RES (22)..(23)..(24)..(25): Xaa is A or G or is absent

SEQ ID NO: 83112 - protein, 40 aa, Artificial Sequence; identical to SEQ ID NO: 19535
  GFR-binding peptide
  MOD_RES (6)..(40): Xaa is C or S
  MOD_RES (20)..(21)..(22)..(23)..(24): Xaa is A or G
  MOD_RES (25)..(26)..(27)..(28): Xaa is A or G or is absent

SEQ ID NO: 83113 - protein, 40 aa, Artificial Sequence; identical to SEQ ID NO: 53946
  GFR-binding peptide
  MOD_RES (6)..(7)..(40): Xaa is C or S
  MOD_RES (21)..(22)..(23)..(24)..(25): Xaa is A or G
  MOD_RES (26)..(27)..(28)..(29): Xaa is A or G or is absent

SEQ ID NO: 83114 - protein, 38 aa, Artificial Sequence; identical to SEQ ID NO: 53950
  GFR-binding peptide
  MOD_RES (6)..(7)..(38): Xaa is C or S

SEQ ID NO: 83115 - protein, 35 aa, Artificial Sequence; identical to SEQ ID NO: 51544
  GFR-binding peptide
  MOD_RES (2)..(3): Xaa is C or S
  MOD_RES (17)..(18)..(19)..(20)..(21): Xaa is A or G
  MOD_RES (22)..(23)..(24)..(25): Xaa is A or G or is absent

SEQ ID NO: 83116 - protein, 40 aa, Artificial Sequence; identical to SEQ ID NO: 18815
  GFR-binding peptide
  MOD_RES (37)..(39): Xaa is C or S
  MOD_RES (16)..(17)..(18)..(19)..(20): Xaa is A or G
  MOD_RES (21)..(22)..(23)..(24): Xaa is A or G or is absent

SEQ ID NO: 83117 - protein, 36 aa, Artificial Sequence; identical to SEQ ID NO: 53952
  GFR-binding peptide
  MOD_RES (1)..(34)..(36): Xaa is C or S
  MOD_RES (15)..(16)..(17)..(18)..(19): Xaa is A or G
  MOD_RES (20)..(21)..(22)..(23): Xaa is A or G or is absent

SEQ ID NO: 83118 - protein, 36 aa, Artificial Sequence; identical to SEQ ID NO: 18816
  GFR-binding peptide
  MOD_RES (1)..(35): Xaa is C or S
  MOD_RES (15)..(16)..(17)..(18)..(19): Xaa is A or G
  MOD_RES (20)..(21)..(22)..(23): Xaa is A or G or is absent

SEQ ID NO: 83119 - protein, 34 aa, Artificial Sequence; identical to SEQ ID NO: 51556
  GFR-binding peptide
  MOD_RES (1)..(2)..(33): Xaa is C or S

SEQ ID NO: 83120 - protein, 43 aa, Artificial Sequence; identical to SEQ ID NO: 19536
  GFR-binding peptide
  MOD_RES (3)..(40)..(42): Xaa is C or S
  MOD_RES (19)..(20)..(21)..(22)..(23): Xaa is A or G
  MOD_RES (24)..(25)..(26)..(27): Xaa is A or G or is absent

SEQ ID NO: 83121 - protein, 35 aa, Artificial Sequence; identical to SEQ ID NO: 52770
  GFR-binding peptide
  MOD_RES (4)..(5): Xaa is C or S

SEQ ID NO: 83122 - protein, 35 aa, Artificial Sequence; identical to SEQ ID NO: 51559
  GFR-binding peptide
  MOD_RES (3)..(4)..(35): Xaa is C or S

SEQ ID NO: 83123 - protein, 34 aa, Artificial Sequence; identical to SEQ ID NO: 18819
  GFR-binding peptide
  MOD_RES (34)..(34): Xaa is C or S
  MOD_RES (14)..(15)..(16)..(17)..(18): Xaa is A or G
  MOD_RES (19)..(20)..(21)..(22): Xaa is A or G or is absent

SEQ ID NO: 83124 - protein, 41 aa, Artificial Sequence; identical to SEQ ID NO: 53967
  GFR-binding peptide
  MOD_RES (4)..(5)..(38)..(40): Xaa is C or S
  MOD_RES (19)..(20)..(21)..(22)..(23): Xaa is A or G
  MOD_RES (24)..(25)..(26)..(27): Xaa is A or G or is absent

SEQ ID NO: 83125 - protein, 36 aa, Artificial Sequence; identical to SEQ ID NO: 55144
  GFR-binding peptide
  MOD_RES (1)..(2)..(33)..(35): Xaa is C or S

SEQ ID NO: 83126 - protein, 39 aa, Artificial Sequence; identical to SEQ ID NO: 51565
  GFR-binding peptide
  MOD_RES (5)..(6)..(37)..(39): Xaa is C or S

SEQ ID NO: 83127 - protein, 36 aa, Artificial Sequence; identical to SEQ ID NO: 53969
  GFR-binding peptide
  MOD_RES (3)..(4)..(35): Xaa is C or S

SEQ ID NO: 83128 - protein, 39 aa, Artificial Sequence; identical to SEQ ID NO: 52774
  GFR-binding peptide
  MOD_RES (4)..(5)..(36)..(38): Xaa is C or S

SEQ ID NO: 83129 - protein, 40 aa, Artificial Sequence; identical to SEQ ID NO: 52775
  GFR-binding peptide
  MOD_RES (4)..(5)..(38)..(40): Xaa is C or S
  MOD_RES (19)..(20)..(21)..(22)..(23): Xaa is A or G
  MOD_RES (24)..(25)..(26)..(27): Xaa is A or G or is absent

SEQ ID NO: 83130 - protein, 38 aa, Artificial Sequence; identical to SEQ ID NO: 18820
  GFR-binding peptide
  MOD_RES (5)..(5): Xaa is C or S

SEQ ID NO: 83131 - protein, 41 aa, Artificial Sequence; identical to SEQ ID NO: 19538
  GFR-binding peptide
  MOD_RES (7)..(41): Xaa is C or S

SEQ ID NO: 83132 - protein, 35 aa, Artificial Sequence; identical to SEQ ID NO: 52781
  GFR-binding peptide
  MOD_RES (1)..(34): Xaa is C or S
  MOD_RES (15)..(16)..(17)..(18)..(19): Xaa is A or G
  MOD_RES (20)..(21)..(22)..(23): Xaa is A or G or is absent

SEQ ID NO: 83133 - protein, 44 aa, Artificial Sequence; identical to SEQ ID NO: 19539
  GFR-binding peptide
  MOD_RES (5)..(42)..(44): Xaa is C or S

SEQ ID NO: 83134 - protein, 34 aa, Artificial Sequence; identical to SEQ ID NO: 52786
  GFR-binding peptide
  MOD_RES (1)..(34): Xaa is C or S
  MOD_RES (15)..(16)..(17)..(18)..(19): Xaa is A or G
  MOD_RES (20)..(21)..(22)..(23): Xaa is A or G or is absent

SEQ ID NO: 83135 - protein, 42 aa, Artificial Sequence; identical to SEQ ID NO: 19540
  GFR-binding peptide
  MOD_RES (5)..(42): Xaa is C or S
  MOD_RES (21)..(22)..(23)..(24)..(25): Xaa is A or G
  MOD_RES (26)..(27)..(28)..(29): Xaa is A or G or is absent

SEQ ID NO: 83136 - protein, 38 aa, Artificial Sequence; identical to SEQ ID NO: 19542
  GFR-binding peptide
  MOD_RES (35)..(37): Xaa is C or S
  MOD_RES (14)..(15)..(16)..(17)..(18): Xaa is A or G
  MOD_RES (19)..(20)..(21)..(22): Xaa is A or G or is absent

SEQ ID NO: 83137 - protein, 30 aa, Artificial Sequence; identical to SEQ ID NO: 55161
  GFR-binding peptide

SEQ ID NO: 83138 - protein, 38 aa, Artificial Sequence; identical to SEQ ID NO: 18823
  GFR-binding peptide
  MOD_RES (4)..(38): Xaa is C or S

SEQ ID NO: 83139 - protein, 35 aa, Artificial Sequence; identical to SEQ ID NO: 19545
  GFR-binding peptide
  MOD_RES (2)..(2): Xaa is C or S
  MOD_RES (16)..(17)..(18)..(19)..(20): Xaa is A or G
  MOD_RES (21)..(22)..(23)..(24): Xaa is A or G or is absent

SEQ ID NO: 83140 - protein, 37 aa, Artificial Sequence; identical to SEQ ID NO: 19546
  GFR-binding peptide
  MOD_RES (34)..(36): Xaa is C or S

SEQ ID NO: 83141 - protein, 36 aa, Artificial Sequence; identical to SEQ ID NO: 51583
  GFR-binding peptide
  MOD_RES (33)..(35): Xaa is C or S
  MOD_RES (14)..(15)..(16)..(17)..(18): Xaa is A or G
  MOD_RES (19)..(20)..(21)..(22): Xaa is A or G or is absent

SEQ ID NO: 83142 - protein, 37 aa, Artificial Sequence; identical to SEQ ID NO: 19547
  GFR-binding peptide
  MOD_RES (34)..(36): Xaa is C or S
  MOD_RES (14)..(15)..(16)..(17)..(18): Xaa is A or G
  MOD_RES (19)..(20)..(21)..(22): Xaa is A or G or is absent

SEQ ID NO: 83143 - protein, 37 aa, Artificial Sequence; identical to SEQ ID NO: 18824
  GFR-binding peptide
  MOD_RES (3)..(3): Xaa is C or S

SEQ ID NO: 83144 - protein, 37 aa, Artificial Sequence; identical to SEQ ID NO: 18825
  GFR-binding peptide
  MOD_RES (37)..(37): Xaa is C or S
  MOD_RES (16)..(17)..(18)..(19)..(20): Xaa is A or G
  MOD_RES (21)..(22)..(23)..(24): Xaa is A or G or is absent

SEQ ID NO: 83145 - protein, 35 aa, Artificial Sequence; identical to SEQ ID NO: 19548
  GFR-binding peptide
  MOD_RES (1)..(1): Xaa is C or S
  MOD_RES (17)..(18)..(19)..(20)..(21): Xaa is A or G
  MOD_RES (22)..(23)..(24)..(25): Xaa is A or G or is absent

SEQ ID NO: 83146 - protein, 38 aa, Artificial Sequence; identical to SEQ ID NO: 19550
  GFR-binding peptide
  MOD_RES (3)..(3): Xaa is C or S
  MOD_RES (19)..(20)..(21)..(22)..(23): Xaa is A or G
  MOD_RES (24)..(25)..(26)..(27): Xaa is A or G or is absent

SEQ ID NO: 83147 - protein, 33 aa, Artificial Sequence; identical to SEQ ID NO: 55173
  GFR-binding peptide
  MOD_RES (2)..(3): Xaa is C or S

SEQ ID NO: 83148 - protein, 38 aa, Artificial Sequence; identical to SEQ ID NO: 18828
  GFR-binding peptide
  MOD_RES (1)..(35)..(37): Xaa is C or S
  MOD_RES (15)..(16)..(17)..(18)..(19): Xaa is A or G
  MOD_RES (20)..(21)..(22)..(23): Xaa is A or G or is absent

SEQ ID NO: 83149 - protein, 37 aa, Artificial Sequence; identical to SEQ ID NO: 55174
  GFR-binding peptide
  MOD_RES (4)..(5)..(36): Xaa is C or S

SEQ ID NO: 83150 - protein, 41 aa, Artificial Sequence; identical to SEQ ID NO: 55175
  GFR-binding peptide
  MOD_RES (5)..(6)..(39)..(41): Xaa is C or S
  MOD_RES (20)..(21)..(22)..(23)..(24): Xaa is A or G
  MOD_RES (25)..(26)..(27)..(28): Xaa is A or G or is absent

SEQ ID NO: 83151 - protein, 43 aa, Artificial Sequence; identical to SEQ ID NO: 53989
  GFR-binding peptide
  MOD_RES (6)..(7)..(40)..(42): Xaa is C or S
  MOD_RES (21)..(22)..(23)..(24)..(25): Xaa is A or G
  MOD_RES (26)..(27)..(28)..(29): Xaa is A or G or is absent

SEQ ID NO: 83152 - protein, 39 aa, Artificial Sequence; identical to SEQ ID NO: 18829
  GFR-binding peptide
  MOD_RES (4)..(38): Xaa is C or S

SEQ ID NO: 83153 - protein, 34 aa, Artificial Sequence; identical to SEQ ID NO: 19551
  GFR-binding peptide
  MOD_RES (15)..(16)..(17)..(18)..(19): Xaa is A or G
  MOD_RES (20)..(21)..(22)..(23): Xaa is A or G or is absent

SEQ ID NO: 83154 - protein, 35 aa, Artificial Sequence; identical to SEQ ID NO: 19552
  GFR-binding peptide
  MOD_RES (1)..(1): Xaa is C or S
  MOD_RES (17)..(18)..(19)..(20)..(21): Xaa is A or G
  MOD_RES (22)..(23)..(24)..(25): Xaa is A or G or is absent

SEQ ID NO: 83155 - protein, 35 aa, Artificial Sequence; identical to SEQ ID NO: 51592
  GFR-binding peptide
  MOD_RES (4)..(5): Xaa is C or S

SEQ ID NO: 83156 - protein, 36 aa, Artificial Sequence; identical to SEQ ID NO: 18831
  GFR-binding peptide
  MOD_RES (4)..(4): Xaa is C or S
  MOD_RES (18)..(19)..(20)..(21)..(22): Xaa is A or G
  MOD_RES (23)..(24)..(25)..(26): Xaa is A or G or is absent

SEQ ID NO: 83157 - protein, 33 aa, Artificial Sequence; identical to SEQ ID NO: 19553
  GFR-binding peptide

SEQ ID NO: 83158 - protein, 32 aa, Artificial Sequence; identical to SEQ ID NO: 51597
  GFR-binding peptide
  MOD_RES (1)..(2): Xaa is C or S

SEQ ID NO: 83159 - protein, 42 aa, Artificial Sequence; identical to SEQ ID NO: 19554
  GFR-binding peptide
  MOD_RES (3)..(40)..(42): Xaa is C or S
  MOD_RES (19)..(20)..(21)..(22)..(23): Xaa is A or G
  MOD_RES (24)..(25)..(26)..(27): Xaa is A or G or is absent

SEQ ID NO: 83160 - protein, 36 aa, Artificial Sequence; identical to SEQ ID NO: 18832
  GFR-binding peptide
  MOD_RES (34)..(36): Xaa is C or S
  MOD_RES (14)..(15)..(16)..(17)..(18): Xaa is A or G
  MOD_RES (19)..(20)..(21)..(22): Xaa is A or G or is absent

SEQ ID NO: 83161 - protein, 42 aa, Artificial Sequence; identical to SEQ ID NO: 52803
  GFR-binding peptide
  MOD_RES (5)..(6)..(39)..(41): Xaa is C or S
  MOD_RES (20)..(21)..(22)..(23)..(24): Xaa is A or G
  MOD_RES (25)..(26)..(27)..(28): Xaa is A or G or is absent

SEQ ID NO: 83162 - protein, 39 aa, Artificial Sequence; identical to SEQ ID NO: 55186
  GFR-binding peptide
  MOD_RES (6)..(7): Xaa is C or S
  MOD_RES (21)..(22)..(23)..(24)..(25): Xaa is A or G
  MOD_RES (26)..(27)..(28)..(29): Xaa is A or G or is absent

SEQ ID NO: 83163 - protein, 32 aa, Artificial Sequence; identical to SEQ ID NO: 53998
  GFR-binding peptide
  MOD_RES (1)..(2): Xaa is C or S

SEQ ID NO: 83164 - protein, 38 aa, Artificial Sequence; identical to SEQ ID NO: 19555
  GFR-binding peptide
  MOD_RES (1)..(38): Xaa is C or S
  MOD_RES (17)..(18)..(19)..(20)..(21): Xaa is A or G
  MOD_RES (22)..(23)..(24)..(25): Xaa is A or G or is absent

SEQ ID NO: 83165 - protein, 36 aa, Artificial Sequence; identical to SEQ ID NO: 19556
  GFR-binding peptide
  MOD_RES (4)..(4): Xaa is C or S
  MOD_RES (18)..(19)..(20)..(21)..(22): Xaa is A or G
  MOD_RES (23)..(24)..(25)..(26): Xaa is A or G or is absent

SEQ ID NO: 83166 - protein, 41 aa, Artificial Sequence; identical to SEQ ID NO: 18836
  GFR-binding peptide
  MOD_RES (3)..(40): Xaa is C or S
  MOD_RES (19)..(20)..(21)..(22)..(23): Xaa is A or G
  MOD_RES (24)..(25)..(26)..(27): Xaa is A or G or is absent

SEQ ID NO: 83167 - protein, 40 aa, Artificial Sequence; identical to SEQ ID NO: 18837
  GFR-binding peptide
  MOD_RES (2)..(39): Xaa is C or S
  MOD_RES (18)..(19)..(20)..(21)..(22): Xaa is A or G
  MOD_RES (23)..(24)..(25)..(26): Xaa is A or G or is absent

SEQ ID NO: 83168 - protein, 43 aa, Artificial Sequence; identical to SEQ ID NO: 18838
  GFR-binding peptide
  MOD_RES (5)..(42): Xaa is C or S

SEQ ID NO: 83169 - protein, 42 aa, Artificial Sequence; identical to SEQ ID NO: 51604
  GFR-binding peptide
  MOD_RES (6)..(7)..(40)..(42): Xaa is C or S
  MOD_RES (21)..(22)..(23)..(24)..(25): Xaa is A or G
  MOD_RES (26)..(27)..(28)..(29): Xaa is A or G or is absent

SEQ ID NO: 83170 - protein, 39 aa, Artificial Sequence; identical to SEQ ID NO: 18839
  GFR-binding peptide
  MOD_RES (5)..(39): Xaa is C or S

SEQ ID NO: 83171 - protein, 40 aa, Artificial Sequence; identical to SEQ ID NO: 52809
  GFR-binding peptide
  MOD_RES (4)..(5)..(38)..(40): Xaa is C or S
  MOD_RES (19)..(20)..(21)..(22)..(23): Xaa is A or G
  MOD_RES (24)..(25)..(26)..(27): Xaa is A or G or is absent

SEQ ID NO: 83172 - protein, 34 aa, Artificial Sequence; identical to SEQ ID NO: 19561
  GFR-binding peptide
  MOD_RES (34)..(34): Xaa is C or S

SEQ ID NO: 83173 - protein, 35 aa, Artificial Sequence; identical to SEQ ID NO: 18840
  GFR-binding peptide
  MOD_RES (35)..(35): Xaa is C or S
  MOD_RES (14)..(15)..(16)..(17)..(18): Xaa is A or G
  MOD_RES (19)..(20)..(21)..(22): Xaa is A or G or is absent

SEQ ID NO: 83174 - protein, 38 aa, Artificial Sequence; identical to SEQ ID NO: 18841
  GFR-binding peptide
  MOD_RES (1)..(38): Xaa is C or S

SEQ ID NO: 83175 - protein, 40 aa, Artificial Sequence; identical to SEQ ID NO: 55196
  GFR-binding peptide
  MOD_RES (5)..(6)..(37)..(39): Xaa is C or S

SEQ ID NO: 83176 - protein, 41 aa, Artificial Sequence; identical to SEQ ID NO: 19562
  GFR-binding peptide
  MOD_RES (4)..(38)..(40): Xaa is C or S
  MOD_RES (18)..(19)..(20)..(21)..(22): Xaa is A or G
  MOD_RES (23)..(24)..(25)..(26): Xaa is A or G or is absent

SEQ ID NO: 83177 - protein, 38 aa, Artificial Sequence; identical to SEQ ID NO: 19564
  GFR-binding peptide
  MOD_RES (1)..(35)..(37): Xaa is C or S

SEQ ID NO: 83178 - protein, 34 aa, Artificial Sequence; identical to SEQ ID NO: 55204
  GFR-binding peptide
  MOD_RES (1)..(2)..(33): Xaa is C or S

SEQ ID NO: 83179 - protein, 37 aa, Artificial Sequence; identical to SEQ ID NO: 55205
  GFR-binding peptide
  MOD_RES (5)..(6)..(37): Xaa is C or S

SEQ ID NO: 83180 - protein, 31 aa, Artificial Sequence; identical to SEQ ID NO: 51610
  GFR-binding peptide
  MOD_RES (31)..(31): Xaa is C or S

SEQ ID NO: 83181 - protein, 35 aa, Artificial Sequence; identical to SEQ ID NO: 54013
  GFR-binding peptide
  MOD_RES (1)..(32)..(34): Xaa is C or S

SEQ ID NO: 83182 - protein, 35 aa, Artificial Sequence; identical to SEQ ID NO: 19565
  GFR-binding peptide
  MOD_RES (35)..(35): Xaa is C or S
  MOD_RES (14)..(15)..(16)..(17)..(18): Xaa is A or G
  MOD_RES (19)..(20)..(21)..(22): Xaa is A or G or is absent

SEQ ID NO: 83183 - protein, 32 aa, Artificial Sequence; identical to SEQ ID NO: 51612
  GFR-binding peptide
  MOD_RES (14)..(15)..(16)..(17)..(18): Xaa is A or G
  MOD_RES (19)..(20)..(21)..(22): Xaa is A or G or is absent

SEQ ID NO: 83184 - protein, 41 aa, Artificial Sequence; identical to SEQ ID NO: 18844
  GFR-binding peptide
  MOD_RES (3)..(40): Xaa is C or S
  MOD_RES (19)..(20)..(21)..(22)..(23): Xaa is A or G
  MOD_RES (24)..(25)..(26)..(27): Xaa is A or G or is absent

SEQ ID NO: 83185 - protein, 36 aa, Artificial Sequence; identical to SEQ ID NO: 18845
  GFR-binding peptide
  MOD_RES (1)..(1): Xaa is C or S
  MOD_RES (17)..(18)..(19)..(20)..(21): Xaa is A or G
  MOD_RES (22)..(23)..(24)..(25): Xaa is A or G or is absent

SEQ ID NO: 83186 - protein, 43 aa, Artificial Sequence; identical to SEQ ID NO: 52818
  GFR-binding peptide
  MOD_RES (6)..(7)..(40)..(42): Xaa is C or S
  MOD_RES (21)..(22)..(23)..(24)..(25): Xaa is A or G
  MOD_RES (26)..(27)..(28)..(29): Xaa is A or G or is absent

SEQ ID NO: 83187 - protein, 39 aa, Artificial Sequence; identical to SEQ ID NO: 51620
  GFR-binding peptide
  MOD_RES (5)..(6)..(39): Xaa is C or S
  MOD_RES (20)..(21)..(22)..(23)..(24): Xaa is A or G
  MOD_RES (25)..(26)..(27)..(28): Xaa is A or G or is absent

SEQ ID NO: 83188 - protein, 34 aa, Artificial Sequence; identical to SEQ ID NO: 51621
  GFR-binding peptide
  MOD_RES (3)..(4): Xaa is C or S

SEQ ID NO: 83189 - protein, 33 aa, Artificial Sequence; identical to SEQ ID NO: 18848
  GFR-binding peptide
  MOD_RES (1)..(1): Xaa is C or S

SEQ ID NO: 83190 - protein, 37 aa, Artificial Sequence; identical to SEQ ID NO: 54020
  GFR-binding peptide
  MOD_RES (4)..(5)..(36): Xaa is C or S

SEQ ID NO: 83191 - protein, 37 aa, Artificial Sequence; identical to SEQ ID NO: 18849
  GFR-binding peptide
  MOD_RES (1)..(1): Xaa is C or S
  MOD_RES (17)..(18)..(19)..(20)..(21): Xaa is A or G
  MOD_RES (22)..(23)..(24)..(25): Xaa is A or G or is absent

SEQ ID NO: 83192 - protein, 32 aa, Artificial Sequence; identical to SEQ ID NO: 51627
  GFR-binding peptide
  MOD_RES (14)..(15)..(16)..(17)..(18): Xaa is A or G
  MOD_RES (19)..(20)..(21)..(22): Xaa is A or G or is absent

SEQ ID NO: 83193 - protein, 41 aa, Artificial Sequence; identical to SEQ ID NO: 18851
  GFR-binding peptide
  MOD_RES (6)..(40): Xaa is C or S

SEQ ID NO: 83194 - protein, 32 aa, Artificial Sequence; identical to SEQ ID NO: 52825
  GFR-binding peptide
  MOD_RES (14)..(15)..(16)..(17)..(18): Xaa is A or G
  MOD_RES (19)..(20)..(21)..(22): Xaa is A or G or is absent

SEQ ID NO: 83195 - protein, 38 aa, Artificial Sequence; identical to SEQ ID NO: 19569
  GFR-binding peptide
  MOD_RES (3)..(37): Xaa is C or S

SEQ ID NO: 83196 - protein, 42 aa, Artificial Sequence; identical to SEQ ID NO: 18854
  GFR-binding peptide
  MOD_RES (7)..(41): Xaa is C or S

SEQ ID NO: 83197 - protein, 43 aa, Artificial Sequence; identical to SEQ ID NO: 19570
  GFR-binding peptide
  MOD_RES (7)..(41)..(43): Xaa is C or S
  MOD_RES (21)..(22)..(23)..(24)..(25): Xaa is A or G
  MOD_RES (26)..(27)..(28)..(29): Xaa is A or G or is absent

SEQ ID NO: 83198 - protein, 34 aa, Artificial Sequence; identical to SEQ ID NO: 55224
  GFR-binding peptide
  MOD_RES (1)..(34): Xaa is C or S
  MOD_RES (15)..(16)..(17)..(18)..(19): Xaa is A or G
  MOD_RES (20)..(21)..(22)..(23): Xaa is A or G or is absent

SEQ ID NO: 83199 - protein, 39 aa, Artificial Sequence; identical to SEQ ID NO: 52831
  GFR-binding peptide
  MOD_RES (3)..(4)..(37)..(39): Xaa is C or S
  MOD_RES (18)..(19)..(20)..(21)..(22): Xaa is A or G
  MOD_RES (23)..(24)..(25)..(26): Xaa is A or G or is absent

SEQ ID NO: 83200 - protein, 39 aa, Artificial Sequence; identical to SEQ ID NO: 19573
  GFR-binding peptide
  MOD_RES (3)..(3): Xaa is C or S
  MOD_RES (19)..(20)..(21)..(22)..(23): Xaa is A or G
  MOD_RES (24)..(25)..(26)..(27): Xaa is A or G or is absent

SEQ ID NO: 83201 - protein, 39 aa, Artificial Sequence; identical to SEQ ID NO: 19575
  GFR-binding peptide
  MOD_RES (2)..(36)..(38): Xaa is C or S

SEQ ID NO: 83202 - protein, 43 aa, Artificial Sequence; identical to SEQ ID NO: 18856
  GFR-binding peptide
  MOD_RES (6)..(40)..(42): Xaa is C or S
  MOD_RES (20)..(21)..(22)..(23)..(24): Xaa is A or G
  MOD_RES (25)..(26)..(27)..(28): Xaa is A or G or is absent

SEQ ID NO: 83203 - protein, 36 aa, Artificial Sequence; identical to SEQ ID NO: 19577
  GFR-binding peptide
  MOD_RES (34)..(36): Xaa is C or S

SEQ ID NO: 83204 - protein, 44 aa, Artificial Sequence; identical to SEQ ID NO: 18857
  GFR-binding peptide
  MOD_RES (4)..(41)..(43): Xaa is C or S
  MOD_RES (20)..(21)..(22)..(23)..(24): Xaa is A or G
  MOD_RES (25)..(26)..(27)..(28): Xaa is A or G or is absent

SEQ ID NO: 83205 - protein, 36 aa, Artificial Sequence; identical to SEQ ID NO: 18858
  GFR-binding peptide
  MOD_RES (34)..(36): Xaa is C or S

SEQ ID NO: 83206 - protein, 38 aa, Artificial Sequence; identical to SEQ ID NO: 19579
  GFR-binding peptide
  MOD_RES (4)..(4): Xaa is C or S
  MOD_RES (20)..(21)..(22)..(23)..(24): Xaa is A or G
  MOD_RES (25)..(26)..(27)..(28): Xaa is A or G or is absent

SEQ ID NO: 83207 - protein, 43 aa, Artificial Sequence; identical to SEQ ID NO: 18862
  GFR-binding peptide
  MOD_RES (7)..(41)..(43): Xaa is C or S
  MOD_RES (21)..(22)..(23)..(24)..(25): Xaa is A or G
  MOD_RES (26)..(27)..(28)..(29): Xaa is A or G or is absent

SEQ ID NO: 83208 - protein, 39 aa, Artificial Sequence; identical to SEQ ID NO: 19581
  GFR-binding peptide
  MOD_RES (3)..(3): Xaa is C or S
  MOD_RES (19)..(20)..(21)..(22)..(23): Xaa is A or G
  MOD_RES (24)..(25)..(26)..(27): Xaa is A or G or is absent

SEQ ID NO: 83209 - protein, 34 aa, Artificial Sequence; identical to SEQ ID NO: 55236
  GFR-binding peptide
  MOD_RES (2)..(3)..(34): Xaa is C or S

SEQ ID NO: 83210 - protein, 37 aa, Artificial Sequence; identical to SEQ ID NO: 18865
  GFR-binding peptide
  MOD_RES (3)..(3): Xaa is C or S
  MOD_RES (19)..(20)..(21)..(22)..(23): Xaa is A or G
  MOD_RES (24)..(25)..(26)..(27): Xaa is A or G or is absent

SEQ ID NO: 83211 - protein, 39 aa, Artificial Sequence; identical to SEQ ID NO: 19582
  GFR-binding peptide
  MOD_RES (5)..(39): Xaa is C or S
  MOD_RES (19)..(20)..(21)..(22)..(23): Xaa is A or G
  MOD_RES (24)..(25)..(26)..(27): Xaa is A or G or is absent

SEQ ID NO: 83212 - protein, 35 aa, Artificial Sequence; identical to SEQ ID NO: 51649
  GFR-binding peptide
  MOD_RES (2)..(3)..(34): Xaa is C or S

SEQ ID NO: 83213 - protein, 37 aa, Artificial Sequence; identical to SEQ ID NO: 18867
  GFR-binding peptide
  MOD_RES (3)..(3): Xaa is C or S
  MOD_RES (19)..(20)..(21)..(22)..(23): Xaa is A or G
  MOD_RES (24)..(25)..(26)..(27): Xaa is A or G or is absent

SEQ ID NO: 83214 - protein, 44 aa, Artificial Sequence; identical to SEQ ID NO: 19583
  GFR-binding peptide
  MOD_RES (7)..(41)..(43): Xaa is C or S
  MOD_RES (21)..(22)..(23)..(24)..(25): Xaa is A or G
  MOD_RES (26)..(27)..(28)..(29): Xaa is A or G or is absent

SEQ ID NO: 83215 - protein, 42 aa, Artificial Sequence; identical to SEQ ID NO: 19584
  GFR-binding peptide
  MOD_RES (7)..(41): Xaa is C or S
  MOD_RES (21)..(22)..(23)..(24)..(25): Xaa is A or G
  MOD_RES (26)..(27)..(28)..(29): Xaa is A or G or is absent

SEQ ID NO: 83216 - protein, 39 aa, Artificial Sequence; identical to SEQ ID NO: 19585
  GFR-binding peptide
  MOD_RES (2)..(39): Xaa is C or S
  MOD_RES (18)..(19)..(20)..(21)..(22): Xaa is A or G
  MOD_RES (23)..(24)..(25)..(26): Xaa is A or G or is absent

SEQ ID NO: 83217 - protein, 32 aa, Artificial Sequence; identical to SEQ ID NO: 19586
  GFR-binding peptide

SEQ ID NO: 83218 - protein, 34 aa, Artificial Sequence; identical to SEQ ID NO: 55238
  GFR-binding peptide
  MOD_RES (33)..(33): Xaa is C or S
  MOD_RES (14)..(15)..(16)..(17)..(18): Xaa is A or G
  MOD_RES (19)..(20)..(21)..(22): Xaa is A or G or is absent

SEQ ID NO: 83219 - protein, 44 aa, Artificial Sequence; identical to SEQ ID NO: 19587
  GFR-binding peptide
  MOD_RES (4)..(41)..(43): Xaa is C or S

SEQ ID NO: 83220 - protein, 35 aa, Artificial Sequence; identical to SEQ ID NO: 51654
  GFR-binding peptide
  MOD_RES (2)..(3)..(34): Xaa is C or S

SEQ ID NO: 83221 - protein, 41 aa, Artificial Sequence; identical to SEQ ID NO: 18870
  GFR-binding peptide
  MOD_RES (3)..(40): Xaa is C or S

SEQ ID NO: 83222 - protein, 33 aa, Artificial Sequence; identical to SEQ ID NO: 19589
  GFR-binding peptide
  MOD_RES (14)..(15)..(16)..(17)..(18): Xaa is A or G
  MOD_RES (19)..(20)..(21)..(22): Xaa is A or G or is absent

SEQ ID NO: 83223 - protein, 34 aa, Artificial Sequence; identical to SEQ ID NO: 18871
  GFR-binding peptide
  MOD_RES (2)..(2): Xaa is C or S
  MOD_RES (16)..(17)..(18)..(19)..(20): Xaa is A or G
  MOD_RES (21)..(22)..(23)..(24): Xaa is A or G or is absent

SEQ ID NO: 83224 - protein, 30 aa, Artificial Sequence; identical to SEQ ID NO: 51656
  GFR-binding peptide

SEQ ID NO: 83225 - protein, 36 aa, Artificial Sequence; identical to SEQ ID NO: 19591
  GFR-binding peptide
  MOD_RES (16)..(17)..(18)..(19)..(20): Xaa is A or G
  MOD_RES (21)..(22)..(23)..(24): Xaa is A or G or is absent

SEQ ID NO: 83226 - protein, 39 aa, Artificial Sequence; identical to SEQ ID NO: 54052
  GFR-binding peptide
  MOD_RES (5)..(6)..(37)..(39): Xaa is C or S

SEQ ID NO: 83227 - protein, 40 aa, Artificial Sequence; identical to SEQ ID NO: 18874
  GFR-binding peptide
  MOD_RES (5)..(39): Xaa is C or S

SEQ ID NO: 83228 - protein, 37 aa, Artificial Sequence; identical to SEQ ID NO: 19596
  GFR-binding peptide
  MOD_RES (2)..(36): Xaa is C or S
  MOD_RES (16)..(17)..(18)..(19)..(20): Xaa is A or G
  MOD_RES (21)..(22)..(23)..(24): Xaa is A or G or is absent

SEQ ID NO: 83229 - protein, 39 aa, Artificial Sequence; identical to SEQ ID NO: 18877
  GFR-binding peptide
  MOD_RES (6)..(6): Xaa is C or S
  MOD_RES (20)..(21)..(22)..(23)..(24): Xaa is A or G
  MOD_RES (25)..(26)..(27)..(28): Xaa is A or G or is absent

SEQ ID NO: 83230 - protein, 39 aa, Artificial Sequence; identical to SEQ ID NO: 55248
  GFR-binding peptide
  MOD_RES (4)..(5)..(38): Xaa is C or S
  MOD_RES (19)..(20)..(21)..(22)..(23): Xaa is A or G
  MOD_RES (24)..(25)..(26)..(27): Xaa is A or G or is absent

SEQ ID NO: 83231 - protein, 37 aa, Artificial Sequence; identical to SEQ ID NO: 18878
  GFR-binding peptide
  MOD_RES (3)..(37): Xaa is C or S
  MOD_RES (17)..(18)..(19)..(20)..(21): Xaa is A or G
  MOD_RES (22)..(23)..(24)..(25): Xaa is A or G or is absent

SEQ ID NO: 83232 - protein, 42 aa, Artificial Sequence; identical to SEQ ID NO: 19597
  GFR-binding peptide
  MOD_RES (2)..(39)..(41): Xaa is C or S
  MOD_RES (18)..(19)..(20)..(21)..(22): Xaa is A or G
  MOD_RES (23)..(24)..(25)..(26): Xaa is A or G or is absent

SEQ ID NO: 83233 - protein, 36 aa, Artificial Sequence; identical to SEQ ID NO: 52854
  GFR-binding peptide
  MOD_RES (33)..(35): Xaa is C or S
  MOD_RES (14)..(15)..(16)..(17)..(18): Xaa is A or G
  MOD_RES (19)..(20)..(21)..(22): Xaa is A or G or is absent

SEQ ID NO: 83234 - protein, 34 aa, Artificial Sequence; identical to SEQ ID NO: 18880
  GFR-binding peptide
  MOD_RES (34)..(34): Xaa is C or S
  MOD_RES (14)..(15)..(16)..(17)..(18): Xaa is A or G
  MOD_RES (19)..(20)..(21)..(22): Xaa is A or G or is absent

SEQ ID NO: 83235 - protein, 38 aa, Artificial Sequence; identical to SEQ ID NO: 19598
  GFR-binding peptide
  MOD_RES (4)..(4): Xaa is C or S
  MOD_RES (20)..(21)..(22)..(23)..(24): Xaa is A or G
  MOD_RES (25)..(26)..(27)..(28): Xaa is A or G or is absent

SEQ ID NO: 83236 - protein, 39 aa, Artificial Sequence; identical to SEQ ID NO: 18881
  GFR-binding peptide
  MOD_RES (5)..(39): Xaa is C or S

SEQ ID NO: 83237 - protein, 37 aa, Artificial Sequence; identical to SEQ ID NO: 19599
  GFR-binding peptide
  MOD_RES (3)..(37): Xaa is C or S

SEQ ID NO: 83238 - protein, 35 aa, Artificial Sequence; identical to SEQ ID NO: 51674
  GFR-binding peptide
  MOD_RES (1)..(2)..(35): Xaa is C or S
  MOD_RES (16)..(17)..(18)..(19)..(20): Xaa is A or G
  MOD_RES (21)..(22)..(23)..(24): Xaa is A or G or is absent

SEQ ID NO: 83239 - protein, 39 aa, Artificial Sequence; identical to SEQ ID NO: 18882
  GFR-binding peptide
  MOD_RES (4)..(4): Xaa is C or S

SEQ ID NO: 83240 - protein, 37 aa, Artificial Sequence; identical to SEQ ID NO: 18884
  GFR-binding peptide
  MOD_RES (2)..(36): Xaa is C or S

SEQ ID NO: 83241 - protein, 36 aa, Artificial Sequence; identical to SEQ ID NO: 55263
  GFR-binding peptide
  MOD_RES (1)..(2)..(33)..(35): Xaa is C or S

SEQ ID NO: 83242 - protein, 40 aa, Artificial Sequence; identical to SEQ ID NO: 19600
  GFR-binding peptide
  MOD_RES (3)..(37)..(39): Xaa is C or S
  MOD_RES (17)..(18)..(19)..(20)..(21): Xaa is A or G
  MOD_RES (22)..(23)..(24)..(25): Xaa is A or G or is absent

SEQ ID NO: 83243 - protein, 39 aa, Artificial Sequence; identical to SEQ ID NO: 52860
  GFR-binding peptide
  MOD_RES (4)..(5)..(38): Xaa is C or S
  MOD_RES (19)..(20)..(21)..(22)..(23): Xaa is A or G
  MOD_RES (24)..(25)..(26)..(27): Xaa is A or G or is absent

SEQ ID NO: 83244 - protein, 37 aa, Artificial Sequence; identical to SEQ ID NO: 19601
  GFR-binding peptide
  MOD_RES (5)..(5): Xaa is C or S
  MOD_RES (19)..(20)..(21)..(22)..(23): Xaa is A or G
  MOD_RES (24)..(25)..(26)..(27): Xaa is A or G or is absent

SEQ ID NO: 83245 - protein, 38 aa, Artificial Sequence; identical to SEQ ID NO: 51678
  GFR-binding peptide
  MOD_RES (3)..(4)..(37): Xaa is C or S
  MOD_RES (18)..(19)..(20)..(21)..(22): Xaa is A or G
  MOD_RES (23)..(24)..(25)..(26): Xaa is A or G or is absent

SEQ ID NO: 83246 - protein, 40 aa, Artificial Sequence; identical to SEQ ID NO: 52862
  GFR-binding peptide
  MOD_RES (6)..(7)..(40): Xaa is C or S
  MOD_RES (21)..(22)..(23)..(24)..(25): Xaa is A or G
  MOD_RES (26)..(27)..(28)..(29): Xaa is A or G or is absent

SEQ ID NO: 83247 - protein, 32 aa, Artificial Sequence; identical to SEQ ID NO: 55266
  GFR-binding peptide
  MOD_RES (31)..(31): Xaa is C or S

SEQ ID NO: 83248 - protein, 37 aa, Artificial Sequence; identical to SEQ ID NO: 18887
  GFR-binding peptide
  MOD_RES (2)..(36): Xaa is C or S
  MOD_RES (16)..(17)..(18)..(19)..(20): Xaa is A or G
  MOD_RES (21)..(22)..(23)..(24): Xaa is A or G or is absent

SEQ ID NO: 83249 - protein, 35 aa, Artificial Sequence; identical to SEQ ID NO: 55271
  GFR-binding peptide
  MOD_RES (1)..(34): Xaa is C or S
  MOD_RES (15)..(16)..(17)..(18)..(19): Xaa is A or G
  MOD_RES (20)..(21)..(22)..(23): Xaa is A or G or is absent

SEQ ID NO: 83250 - protein, 41 aa, Artificial Sequence; identical to SEQ ID NO: 19602
  GFR-binding peptide
  MOD_RES (4)..(41): Xaa is C or S

SEQ ID NO: 83251 - protein, 39 aa, Artificial Sequence; identical to SEQ ID NO: 18891
  GFR-binding peptide
  MOD_RES (7)..(7): Xaa is C or S
  MOD_RES (21)..(22)..(23)..(24)..(25): Xaa is A or G
  MOD_RES (26)..(27)..(28)..(29): Xaa is A or G or is absent

SEQ ID NO: 83252 - protein, 36 aa, Artificial Sequence; identical to SEQ ID NO: 52867
  GFR-binding peptide
  MOD_RES (4)..(5)..(36): Xaa is C or S

SEQ ID NO: 83253 - protein, 40 aa, Artificial Sequence; identical to SEQ ID NO: 54080
  GFR-binding peptide
  MOD_RES (5)..(6)..(37)..(39): Xaa is C or S

SEQ ID NO: 83254 - protein, 39 aa, Artificial Sequence; identical to SEQ ID NO: 19603
  GFR-binding peptide
  MOD_RES (7)..(7): Xaa is C or S
  MOD_RES (21)..(22)..(23)..(24)..(25): Xaa is A or G
  MOD_RES (26)..(27)..(28)..(29): Xaa is A or G or is absent

SEQ ID NO: 83255 - protein, 36 aa, Artificial Sequence; identical to SEQ ID NO: 54082
  GFR-binding peptide
  MOD_RES (2)..(3)..(36): Xaa is C or S
  MOD_RES (17)..(18)..(19)..(20)..(21): Xaa is A or G
  MOD_RES (22)..(23)..(24)..(25): Xaa is A or G or is absent

SEQ ID NO: 83256 - protein, 40 aa, Artificial Sequence; identical to SEQ ID NO: 18892
  GFR-binding peptide
  MOD_RES (7)..(7): Xaa is C or S
  MOD_RES (21)..(22)..(23)..(24)..(25): Xaa is A or G
  MOD_RES (26)..(27)..(28)..(29): Xaa is A or G or is absent

SEQ ID NO: 83257 - protein, 35 aa, Artificial Sequence; identical to SEQ ID NO: 52875
  GFR-binding peptide
  MOD_RES (33)..(35): Xaa is C or S
  MOD_RES (14)..(15)..(16)..(17)..(18): Xaa is A or G
  MOD_RES (19)..(20)..(21)..(22): Xaa is A or G or is absent

SEQ ID NO: 83258 - protein, 40 aa, Artificial Sequence; identical to SEQ ID NO: 19604
  GFR-binding peptide
  MOD_RES (4)..(38)..(40): Xaa is C or S

SEQ ID NO: 83259 - protein, 37 aa, Artificial Sequence; identical to SEQ ID NO: 51690
  GFR-binding peptide
  MOD_RES (2)..(3)..(36): Xaa is C or S
  MOD_RES (17)..(18)..(19)..(20)..(21): Xaa is A or G
  MOD_RES (22)..(23)..(24)..(25): Xaa is A or G or is absent

SEQ ID NO: 83260 - protein, 39 aa, Artificial Sequence; identical to SEQ ID NO: 19605
  GFR-binding peptide
  MOD_RES (5)..(39): Xaa is C or S
  MOD_RES (19)..(20)..(21)..(22)..(23): Xaa is A or G
  MOD_RES (24)..(25)..(26)..(27): Xaa is A or G or is absent

SEQ ID NO: 83261 - protein, 40 aa, Artificial Sequence; identical to SEQ ID NO: 18895
  GFR-binding peptide
  MOD_RES (4)..(4): Xaa is C or S

SEQ ID NO: 83262 - protein, 34 aa, Artificial Sequence; identical to SEQ ID NO: 18896
  GFR-binding peptide
  MOD_RES (1)..(1): Xaa is C or S
  MOD_RES (15)..(16)..(17)..(18)..(19): Xaa is A or G
  MOD_RES (20)..(21)..(22)..(23): Xaa is A or G or is absent

SEQ ID NO: 83263 - protein, 35 aa, Artificial Sequence; identical to SEQ ID NO: 54089
  GFR-binding peptide
  MOD_RES (1)..(2)..(35): Xaa is C or S
  MOD_RES (16)..(17)..(18)..(19)..(20): Xaa is A or G
  MOD_RES (21)..(22)..(23)..(24): Xaa is A or G or is absent

SEQ ID NO: 83264 - protein, 33 aa, Artificial Sequence; identical to SEQ ID NO: 54090
  GFR-binding peptide
  MOD_RES (31)..(33): Xaa is C or S

SEQ ID NO: 83265 - protein, 35 aa, Artificial Sequence; identical to SEQ ID NO: 52881
  GFR-binding peptide
  MOD_RES (33)..(35): Xaa is C or S
  MOD_RES (14)..(15)..(16)..(17)..(18): Xaa is A or G
  MOD_RES (19)..(20)..(21)..(22): Xaa is A or G or is absent

SEQ ID NO: 83266 - protein, 35 aa, Artificial Sequence; identical to SEQ ID NO: 19607
  GFR-binding peptide
  MOD_RES (1)..(35): Xaa is C or S

SEQ ID NO: 83267 - protein, 38 aa, Artificial Sequence; identical to SEQ ID NO: 19608
  GFR-binding peptide
  MOD_RES (37)..(37): Xaa is C or S

SEQ ID NO: 83268 - protein, 34 aa, Artificial Sequence; identical to SEQ ID NO: 55286
  GFR-binding peptide
  MOD_RES (3)..(4): Xaa is C or S

SEQ ID NO: 83269 - protein, 39 aa, Artificial Sequence; identical to SEQ ID NO: 51697
  GFR-binding peptide
  MOD_RES (4)..(5)..(38): Xaa is C or S
  MOD_RES (19)..(20)..(21)..(22)..(23): Xaa is A or G
  MOD_RES (24)..(25)..(26)..(27): Xaa is A or G or is absent

SEQ ID NO: 83270 - protein, 34 aa, Artificial Sequence; identical to SEQ ID NO: 51698
  GFR-binding peptide
  MOD_RES (2)..(3)..(34): Xaa is C or S

SEQ ID NO: 83271 - protein, 36 aa, Artificial Sequence; identical to SEQ ID NO: 55288
  GFR-binding peptide
  MOD_RES (3)..(4): Xaa is C or S
  MOD_RES (18)..(19)..(20)..(21)..(22): Xaa is A or G
  MOD_RES (23)..(24)..(25)..(26): Xaa is A or G or is absent

SEQ ID NO: 83272 - protein, 32 aa, Artificial Sequence; identical to SEQ ID NO: 54095
  GFR-binding peptide
  MOD_RES (14)..(15)..(16)..(17)..(18): Xaa is A or G
  MOD_RES (19)..(20)..(21)..(22): Xaa is A or G or is absent

SEQ ID NO: 83273 - protein, 34 aa, Artificial Sequence; identical to SEQ ID NO: 18902
  GFR-binding peptide
  MOD_RES (14)..(15)..(16)..(17)..(18): Xaa is A or G
  MOD_RES (19)..(20)..(21)..(22): Xaa is A or G or is absent

SEQ ID NO: 83274 - protein, 35 aa, Artificial Sequence; identical to SEQ ID NO: 52890
  GFR-binding peptide
  MOD_RES (33)..(35): Xaa is C or S
  MOD_RES (14)..(15)..(16)..(17)..(18): Xaa is A or G
  MOD_RES (19)..(20)..(21)..(22): Xaa is A or G or is absent

SEQ ID NO: 83275 - protein, 39 aa, Artificial Sequence; identical to SEQ ID NO: 18903
  GFR-binding peptide
  MOD_RES (3)..(37)..(39): Xaa is C or S
  MOD_RES (17)..(18)..(19)..(20)..(21): Xaa is A or G
  MOD_RES (22)..(23)..(24)..(25): Xaa is A or G or is absent

SEQ ID NO: 83276 - protein, 39 aa, Artificial Sequence; identical to SEQ ID NO: 19613
  GFR-binding peptide
  MOD_RES (6)..(6): Xaa is C or S
  MOD_RES (20)..(21)..(22)..(23)..(24): Xaa is A or G
  MOD_RES (25)..(26)..(27)..(28): Xaa is A or G or is absent

SEQ ID NO: 83277 - protein, 32 aa, Artificial Sequence; identical to SEQ ID NO: 52893
  GFR-binding peptide
  MOD_RES (1)..(2): Xaa is C or S

SEQ ID NO: 83278 - protein, 34 aa, Artificial Sequence; identical to SEQ ID NO: 19615
  GFR-binding peptide
  MOD_RES (2)..(2): Xaa is C or S

SEQ ID NO: 83279 - protein, 35 aa, Artificial Sequence; identical to SEQ ID NO: 18906
  GFR-binding peptide
  MOD_RES (1)..(1): Xaa is C or S
  MOD_RES (17)..(18)..(19)..(20)..(21): Xaa is A or G
  MOD_RES (22)..(23)..(24)..(25): Xaa is A or G or is absent

SEQ ID NO: 83280 - protein, 37 aa, Artificial Sequence; identical to SEQ ID NO: 18909
  GFR-binding peptide
  MOD_RES (1)..(35)..(37): Xaa is C or S
  MOD_RES (15)..(16)..(17)..(18)..(19): Xaa is A or G
  MOD_RES (20)..(21)..(22)..(23): Xaa is A or G or is absent

SEQ ID NO: 83281 - protein, 42 aa, Artificial Sequence; identical to SEQ ID NO: 18910
  GFR-binding peptide
  MOD_RES (5)..(39)..(41): Xaa is C or S

SEQ ID NO: 83282 - protein, 35 aa, Artificial Sequence; identical to SEQ ID NO: 19617
  GFR-binding peptide
  MOD_RES (34)..(34): Xaa is C or S
  MOD_RES (14)..(15)..(16)..(17)..(18): Xaa is A or G
  MOD_RES (19)..(20)..(21)..(22): Xaa is A or G or is absent

SEQ ID NO: 83283 - protein, 36 aa, Artificial Sequence; identical to SEQ ID NO: 19618
  GFR-binding peptide

SEQ ID NO: 83284 - protein, 36 aa, Artificial Sequence; identical to SEQ ID NO: 19619
  GFR-binding peptide
  MOD_RES (36)..(36): Xaa is C or S

SEQ ID NO: 83285 - protein, 33 aa, Artificial Sequence; identical to SEQ ID NO: 55297
  GFR-binding peptide
  MOD_RES (33)..(33): Xaa is C or S
  MOD_RES (14)..(15)..(16)..(17)..(18): Xaa is A or G
  MOD_RES (19)..(20)..(21)..(22): Xaa is A or G or is absent

SEQ ID NO: 83286 - protein, 38 aa, Artificial Sequence; identical to SEQ ID NO: 19620
  GFR-binding peptide
  MOD_RES (4)..(38): Xaa is C or S
  MOD_RES (18)..(19)..(20)..(21)..(22): Xaa is A or G
  MOD_RES (23)..(24)..(25)..(26): Xaa is A or G or is absent

SEQ ID NO: 83287 - protein, 41 aa, Artificial Sequence; identical to SEQ ID NO: 18911
  GFR-binding peptide
  MOD_RES (2)..(39)..(41): Xaa is C or S
  MOD_RES (18)..(19)..(20)..(21)..(22): Xaa is A or G
  MOD_RES (23)..(24)..(25)..(26): Xaa is A or G or is absent

SEQ ID NO: 83288 - protein, 33 aa, Artificial Sequence; identical to SEQ ID NO: 19621
  GFR-binding peptide

SEQ ID NO: 83289 - protein, 33 aa, Artificial Sequence; identical to SEQ ID NO: 51714
  GFR-binding peptide
  MOD_RES (1)..(1): Xaa is C or S
  MOD_RES (15)..(16)..(17)..(18)..(19): Xaa is A or G
  MOD_RES (20)..(21)..(22)..(23): Xaa is A or G or is absent

SEQ ID NO: 83290 - protein, 35 aa, Artificial Sequence; identical to SEQ ID NO: 19623
  GFR-binding peptide
  MOD_RES (3)..(3): Xaa is C or S

SEQ ID NO: 83291 - protein, 41 aa, Artificial Sequence; identical to SEQ ID NO: 18917
  GFR-binding peptide
  MOD_RES (4)..(38)..(40): Xaa is C or S

SEQ ID NO: 83292 - protein, 33 aa, Artificial Sequence; identical to SEQ ID NO: 18918
  GFR-binding peptide
  MOD_RES (14)..(15)..(16)..(17)..(18): Xaa is A or G
  MOD_RES (19)..(20)..(21)..(22): Xaa is A or G or is absent

SEQ ID NO: 83293 - protein, 33 aa, Artificial Sequence; identical to SEQ ID NO: 51717
  GFR-binding peptide
  MOD_RES (1)..(1): Xaa is C or S
  MOD_RES (15)..(16)..(17)..(18)..(19): Xaa is A or G
  MOD_RES (20)..(21)..(22)..(23): Xaa is A or G or is absent

SEQ ID NO: 83294 - protein, 38 aa, Artificial Sequence; identical to SEQ ID NO: 55305
  GFR-binding peptide
  MOD_RES (4)..(5)..(36)..(38): Xaa is C or S

SEQ ID NO: 83295 - protein, 38 aa, Artificial Sequence; identical to SEQ ID NO: 18919
  GFR-binding peptide
  MOD_RES (6)..(6): Xaa is C or S

SEQ ID NO: 83296 - protein, 39 aa, Artificial Sequence; identical to SEQ ID NO: 55307
  GFR-binding peptide
  MOD_RES (4)..(5)..(38): Xaa is C or S
  MOD_RES (19)..(20)..(21)..(22)..(23): Xaa is A or G
  MOD_RES (24)..(25)..(26)..(27): Xaa is A or G or is absent

SEQ ID NO: 83297 - protein, 34 aa, Artificial Sequence; identical to SEQ ID NO: 55312
  GFR-binding peptide
  MOD_RES (1)..(2)..(33): Xaa is C or S

SEQ ID NO: 83298 - protein, 34 aa, Artificial Sequence; identical to SEQ ID NO: 19625
  GFR-binding peptide
  MOD_RES (1)..(1): Xaa is C or S

SEQ ID NO: 83299 - protein, 41 aa, Artificial Sequence; identical to SEQ ID NO: 18921
  GFR-binding peptide
  MOD_RES (2)..(39)..(41): Xaa is C or S
  MOD_RES (18)..(19)..(20)..(21)..(22): Xaa is A or G
  MOD_RES (23)..(24)..(25)..(26): Xaa is A or G or is absent

SEQ ID NO: 83300 - protein, 35 aa, Artificial Sequence; identical to SEQ ID NO: 19626
  GFR-binding peptide
  MOD_RES (35)..(35): Xaa is C or S
  MOD_RES (14)..(15)..(16)..(17)..(18): Xaa is A or G
  MOD_RES (19)..(20)..(21)..(22): Xaa is A or G or is absent

SEQ ID NO: 83301 - protein, 44 aa, Artificial Sequence; identical to SEQ ID NO: 19628
  GFR-binding peptide
  MOD_RES (4)..(41)..(43): Xaa is C or S

SEQ ID NO: 83302 - protein, 39 aa, Artificial Sequence; identical to SEQ ID NO: 18923
  GFR-binding peptide
  MOD_RES (6)..(6): Xaa is C or S
  MOD_RES (20)..(21)..(22)..(23)..(24): Xaa is A or G
  MOD_RES (25)..(26)..(27)..(28): Xaa is A or G or is absent

SEQ ID NO: 83303 - protein, 39 aa, Artificial Sequence; identical to SEQ ID NO: 55314
  GFR-binding peptide
  MOD_RES (5)..(6)..(39): Xaa is C or S
  MOD_RES (20)..(21)..(22)..(23)..(24): Xaa is A or G
  MOD_RES (25)..(26)..(27)..(28): Xaa is A or G or is absent

SEQ ID NO: 83304 - protein, 37 aa, Artificial Sequence; identical to SEQ ID NO: 19629
  GFR-binding peptide
  MOD_RES (5)..(5): Xaa is C or S
  MOD_RES (19)..(20)..(21)..(22)..(23): Xaa is A or G
  MOD_RES (24)..(25)..(26)..(27): Xaa is A or G or is absent

SEQ ID NO: 83305 - protein, 39 aa, Artificial Sequence; identical to SEQ ID NO: 55317
  GFR-binding peptide
  MOD_RES (5)..(6)..(39): Xaa is C or S
  MOD_RES (20)..(21)..(22)..(23)..(24): Xaa is A or G
  MOD_RES (25)..(26)..(27)..(28): Xaa is A or G or is absent

SEQ ID NO: 83306 - protein, 39 aa, Artificial Sequence; identical to SEQ ID NO: 18924
  GFR-binding peptide
  MOD_RES (4)..(4): Xaa is C or S

SEQ ID NO: 83307 - protein, 38 aa, Artificial Sequence; identical to SEQ ID NO: 18925
  GFR-binding peptide
  MOD_RES (36)..(38): Xaa is C or S
  MOD_RES (15)..(16)..(17)..(18)..(19): Xaa is A or G
  MOD_RES (20)..(21)..(22)..(23): Xaa is A or G or is absent

SEQ ID NO: 83308 - protein, 32 aa, Artificial Sequence; identical to SEQ ID NO: 55318
  GFR-binding peptide
  MOD_RES (31)..(31): Xaa is C or S

SEQ ID NO: 83309 - protein, 41 aa, Artificial Sequence; identical to SEQ ID NO: 54125
  GFR-binding peptide
  MOD_RES (6)..(7)..(38)..(40): Xaa is C or S

SEQ ID NO: 83310 - protein, 40 aa, Artificial Sequence; identical to SEQ ID NO: 18927
  GFR-binding peptide
  MOD_RES (5)..(39): Xaa is C or S
  MOD_RES (19)..(20)..(21)..(22)..(23): Xaa is A or G
  MOD_RES (24)..(25)..(26)..(27): Xaa is A or G or is absent

SEQ ID NO: 83311 - protein, 31 aa, Artificial Sequence; identical to SEQ ID NO: 52922
  GFR-binding peptide
  MOD_RES (31)..(31): Xaa is C or S

SEQ ID NO: 83312 - protein, 36 aa, Artificial Sequence; identical to SEQ ID NO: 19631
  GFR-binding peptide
  MOD_RES (2)..(36): Xaa is C or S
  MOD_RES (16)..(17)..(18)..(19)..(20): Xaa is A or G
  MOD_RES (21)..(22)..(23)..(24): Xaa is A or G or is absent

SEQ ID NO: 83313 - protein, 42 aa, Artificial Sequence; identical to SEQ ID NO: 18928
  GFR-binding peptide
  MOD_RES (5)..(39)..(41): Xaa is C or S

SEQ ID NO: 83314 - protein, 41 aa, Artificial Sequence; identical to SEQ ID NO: 18929
  GFR-binding peptide
  MOD_RES (5)..(39)..(41): Xaa is C or S
  MOD_RES (19)..(20)..(21)..(22)..(23): Xaa is A or G
  MOD_RES (24)..(25)..(26)..(27): Xaa is A or G or is absent

SEQ ID NO: 83315 - protein, 40 aa, Artificial Sequence; identical to SEQ ID NO: 19633
  GFR-binding peptide
  MOD_RES (4)..(4): Xaa is C or S

SEQ ID NO: 83316 - protein, 38 aa, Artificial Sequence; identical to SEQ ID NO: 19635
  GFR-binding peptide
  MOD_RES (3)..(3): Xaa is C or S
  MOD_RES (19)..(20)..(21)..(22)..(23): Xaa is A or G
  MOD_RES (24)..(25)..(26)..(27): Xaa is A or G or is absent

SEQ ID NO: 83317 - protein, 40 aa, Artificial Sequence; identical to SEQ ID NO: 51733
  GFR-binding peptide
  MOD_RES (3)..(4)..(37)..(39): Xaa is C or S
  MOD_RES (18)..(19)..(20)..(21)..(22): Xaa is A or G
  MOD_RES (23)..(24)..(25)..(26): Xaa is A or G or is absent

SEQ ID NO: 83318 - protein, 43 aa, Artificial Sequence; identical to SEQ ID NO: 18931
  GFR-binding peptide
  MOD_RES (7)..(41)..(43): Xaa is C or S

SEQ ID NO: 83319 - protein, 32 aa, Artificial Sequence; identical to SEQ ID NO: 52929
  GFR-binding peptide
  MOD_RES (1)..(32): Xaa is C or S

SEQ ID NO: 83320 - protein, 36 aa, Artificial Sequence; identical to SEQ ID NO: 19636
  GFR-binding peptide
  MOD_RES (34)..(36): Xaa is C or S
  MOD_RES (14)..(15)..(16)..(17)..(18): Xaa is A or G
  MOD_RES (19)..(20)..(21)..(22): Xaa is A or G or is absent

SEQ ID NO: 83321 - protein, 34 aa, Artificial Sequence; identical to SEQ ID NO: 18933
  GFR-binding peptide

SEQ ID NO: 83322 - protein, 41 aa, Artificial Sequence; identical to SEQ ID NO: 19637
  GFR-binding peptide
  MOD_RES (3)..(40): Xaa is C or S

SEQ ID NO: 83323 - protein, 33 aa, Artificial Sequence; identical to SEQ ID NO: 51740
  GFR-binding peptide
  MOD_RES (1)..(2)..(33): Xaa is C or S

SEQ ID NO: 83324 - protein, 44 aa, Artificial Sequence; identical to SEQ ID NO: 19640
  GFR-binding peptide
  MOD_RES (5)..(42)..(44): Xaa is C or S
  MOD_RES (21)..(22)..(23)..(24)..(25): Xaa is A or G
  MOD_RES (26)..(27)..(28)..(29): Xaa is A or G or is absent

SEQ ID NO: 83325 - protein, 39 aa, Artificial Sequence; identical to SEQ ID NO: 19641
  GFR-binding peptide
  MOD_RES (4)..(38): Xaa is C or S
  MOD_RES (18)..(19)..(20)..(21)..(22): Xaa is A or G
  MOD_RES (23)..(24)..(25)..(26): Xaa is A or G or is absent

SEQ ID NO: 83326 - protein, 38 aa, Artificial Sequence; identical to SEQ ID NO: 19642
  GFR-binding peptide
  MOD_RES (6)..(6): Xaa is C or S

SEQ ID NO: 83327 - protein, 33 aa, Artificial Sequence; identical to SEQ ID NO: 18938
  GFR-binding peptide
  MOD_RES (14)..(15)..(16)..(17)..(18): Xaa is A or G
  MOD_RES (19)..(20)..(21)..(22): Xaa is A or G or is absent

SEQ ID NO: 83328 - protein, 39 aa, Artificial Sequence; identical to SEQ ID NO: 19643
  GFR-binding peptide
  MOD_RES (7)..(7): Xaa is C or S

SEQ ID NO: 83329 - protein, 33 aa, Artificial Sequence; identical to SEQ ID NO: 18940
  GFR-binding peptide
  MOD_RES (14)..(15)..(16)..(17)..(18): Xaa is A or G
  MOD_RES (19)..(20)..(21)..(22): Xaa is A or G or is absent

SEQ ID NO: 83330 - protein, 34 aa, Artificial Sequence; identical to SEQ ID NO: 19645
  GFR-binding peptide
  MOD_RES (2)..(2): Xaa is C or S

SEQ ID NO: 83331 - protein, 39 aa, Artificial Sequence; identical to SEQ ID NO: 52947
  GFR-binding peptide
  MOD_RES (5)..(6)..(39): Xaa is C or S
  MOD_RES (20)..(21)..(22)..(23)..(24): Xaa is A or G
  MOD_RES (25)..(26)..(27)..(28): Xaa is A or G or is absent

SEQ ID NO: 83332 - protein, 38 aa, Artificial Sequence; identical to SEQ ID NO: 55351
  GFR-binding peptide
  MOD_RES (4)..(5)..(36)..(38): Xaa is C or S

SEQ ID NO: 83333 - protein, 35 aa, Artificial Sequence; identical to SEQ ID NO: 18944
  GFR-binding peptide
  MOD_RES (2)..(2): Xaa is C or S

SEQ ID NO: 83334 - protein, 35 aa, Artificial Sequence; identical to SEQ ID NO: 19647
  GFR-binding peptide
  MOD_RES (3)..(3): Xaa is C or S
  MOD_RES (17)..(18)..(19)..(20)..(21): Xaa is A or G
  MOD_RES (22)..(23)..(24)..(25): Xaa is A or G or is absent

SEQ ID NO: 83335 - protein, 38 aa, Artificial Sequence; identical to SEQ ID NO: 54152
  GFR-binding peptide
  MOD_RES (4)..(5)..(38): Xaa is C or S
  MOD_RES (19)..(20)..(21)..(22)..(23): Xaa is A or G
  MOD_RES (24)..(25)..(26)..(27): Xaa is A or G or is absent

SEQ ID NO: 83336 - protein, 37 aa, Artificial Sequence; identical to SEQ ID NO: 54156
  GFR-binding peptide
  MOD_RES (6)..(7): Xaa is C or S

SEQ ID NO: 83337 - protein, 36 aa, Artificial Sequence; identical to SEQ ID NO: 19650
  GFR-binding peptide
  MOD_RES (36)..(36): Xaa is C or S
  MOD_RES (15)..(16)..(17)..(18)..(19): Xaa is A or G
  MOD_RES (20)..(21)..(22)..(23): Xaa is A or G or is absent

SEQ ID NO: 83338 - protein, 36 aa, Artificial Sequence; identical to SEQ ID NO: 55359
  GFR-binding peptide
  MOD_RES (1)..(34)..(36): Xaa is C or S
  MOD_RES (15)..(16)..(17)..(18)..(19): Xaa is A or G
  MOD_RES (20)..(21)..(22)..(23): Xaa is A or G or is absent

SEQ ID NO: 83339 - protein, 36 aa, Artificial Sequence; identical to SEQ ID NO: 18947
  GFR-binding peptide
  MOD_RES (2)..(36): Xaa is C or S

SEQ ID NO: 83340 - protein, 42 aa, Artificial Sequence; identical to SEQ ID NO: 18948
  GFR-binding peptide
  MOD_RES (6)..(40)..(42): Xaa is C or S

SEQ ID NO: 83341 - protein, 37 aa, Artificial Sequence; identical to SEQ ID NO: 55361
  GFR-binding peptide
  MOD_RES (4)..(5)..(36): Xaa is C or S

SEQ ID NO: 83342 - protein, 38 aa, Artificial Sequence; identical to SEQ ID NO: 18949
  GFR-binding peptide
  MOD_RES (3)..(37): Xaa is C or S

SEQ ID NO: 83343 - protein, 37 aa, Artificial Sequence; identical to SEQ ID NO: 18951
  GFR-binding peptide
  MOD_RES (5)..(5): Xaa is C or S

SEQ ID NO: 83344 - protein, 37 aa, Artificial Sequence; identical to SEQ ID NO: 54160
  GFR-binding peptide
  MOD_RES (1)..(34)..(36): Xaa is C or S
  MOD_RES (15)..(16)..(17)..(18)..(19): Xaa is A or G
  MOD_RES (20)..(21)..(22)..(23): Xaa is A or G or is absent

SEQ ID NO: 83345 - protein, 36 aa, Artificial Sequence; identical to SEQ ID NO: 19652
  GFR-binding peptide
  MOD_RES (1)..(35): Xaa is C or S
  MOD_RES (15)..(16)..(17)..(18)..(19): Xaa is A or G
  MOD_RES (20)..(21)..(22)..(23): Xaa is A or G or is absent

SEQ ID NO: 83346 - protein, 35 aa, Artificial Sequence; identical to SEQ ID NO: 18952
  GFR-binding peptide
  MOD_RES (1)..(35): Xaa is C or S
  MOD_RES (15)..(16)..(17)..(18)..(19): Xaa is A or G
  MOD_RES (20)..(21)..(22)..(23): Xaa is A or G or is absent

SEQ ID NO: 83347 - protein, 38 aa, Artificial Sequence; identical to SEQ ID NO: 54161
  GFR-binding peptide
  MOD_RES (3)..(4)..(35)..(37): Xaa is C or S

SEQ ID NO: 83348 - protein, 37 aa, Artificial Sequence; identical to SEQ ID NO: 54162
  GFR-binding peptide
  MOD_RES (6)..(7): Xaa is C or S

SEQ ID NO: 83349 - protein, 37 aa, Artificial Sequence; identical to SEQ ID NO: 19654
  GFR-binding peptide
  MOD_RES (5)..(5): Xaa is C or S

SEQ ID NO: 83350 - protein, 35 aa, Artificial Sequence; identical to SEQ ID NO: 55366
  GFR-binding peptide
  MOD_RES (4)..(5): Xaa is C or S

SEQ ID NO: 83351 - protein, 41 aa, Artificial Sequence; identical to SEQ ID NO: 19656
  GFR-binding peptide
  MOD_RES (6)..(40): Xaa is C or S

SEQ ID NO: 83352 - protein, 35 aa, Artificial Sequence; identical to SEQ ID NO: 18954
  GFR-binding peptide
  MOD_RES (3)..(3): Xaa is C or S

SEQ ID NO: 83353 - protein, 40 aa, Artificial Sequence; identical to SEQ ID NO: 52962
  GFR-binding peptide
  MOD_RES (5)..(6)..(37)..(39): Xaa is C or S

SEQ ID NO: 83354 - protein, 43 aa, Artificial Sequence; identical to SEQ ID NO: 19660
  GFR-binding peptide
  MOD_RES (6)..(40)..(42): Xaa is C or S
  MOD_RES (20)..(21)..(22)..(23)..(24): Xaa is A or G
  MOD_RES (25)..(26)..(27)..(28): Xaa is A or G or is absent

SEQ ID NO: 83355 - protein, 36 aa, Artificial Sequence; identical to SEQ ID NO: 19661
  GFR-binding peptide
  MOD_RES (1)..(1): Xaa is C or S
  MOD_RES (17)..(18)..(19)..(20)..(21): Xaa is A or G
  MOD_RES (22)..(23)..(24)..(25): Xaa is A or G or is absent

SEQ ID NO: 83356 - protein, 42 aa, Artificial Sequence; identical to SEQ ID NO: 18957
  GFR-binding peptide
  MOD_RES (6)..(40)..(42): Xaa is C or S
  MOD_RES (20)..(21)..(22)..(23)..(24): Xaa is A or G
  MOD_RES (25)..(26)..(27)..(28): Xaa is A or G or is absent

SEQ ID NO: 83357 - protein, 35 aa, Artificial Sequence; identical to SEQ ID NO: 52967
  GFR-binding peptide
  MOD_RES (1)..(32)..(34): Xaa is C or S

SEQ ID NO: 83358 - protein, 38 aa, Artificial Sequence; identical to SEQ ID NO: 51781
  GFR-binding peptide
  MOD_RES (2)..(3)..(36)..(38): Xaa is C or S
  MOD_RES (17)..(18)..(19)..(20)..(21): Xaa is A or G
  MOD_RES (22)..(23)..(24)..(25): Xaa is A or G or is absent

SEQ ID NO: 83359 - protein, 33 aa, Artificial Sequence; identical to SEQ ID NO: 18960
  GFR-binding peptide
  MOD_RES (15)..(16)..(17)..(18)..(19): Xaa is A or G
  MOD_RES (20)..(21)..(22)..(23): Xaa is A or G or is absent

SEQ ID NO: 83360 - protein, 38 aa, Artificial Sequence; identical to SEQ ID NO: 19663
  GFR-binding peptide
  MOD_RES (5)..(5): Xaa is C or S
  MOD_RES (19)..(20)..(21)..(22)..(23): Xaa is A or G
  MOD_RES (24)..(25)..(26)..(27): Xaa is A or G or is absent

SEQ ID NO: 83361 - protein, 34 aa, Artificial Sequence; identical to SEQ ID NO: 52978
  GFR-binding peptide
  MOD_RES (31)..(33): Xaa is C or S

SEQ ID NO: 83362 - protein, 40 aa, Artificial Sequence; identical to SEQ ID NO: 19667
  GFR-binding peptide
  MOD_RES (5)..(5): Xaa is C or S
  MOD_RES (21)..(22)..(23)..(24)..(25): Xaa is A or G
  MOD_RES (26)..(27)..(28)..(29): Xaa is A or G or is absent

SEQ ID NO: 83363 - protein, 39 aa, Artificial Sequence; identical to SEQ ID NO: 19670
  GFR-binding peptide
  MOD_RES (3)..(37)..(39): Xaa is C or S
  MOD_RES (17)..(18)..(19)..(20)..(21): Xaa is A or G
  MOD_RES (22)..(23)..(24)..(25): Xaa is A or G or is absent

SEQ ID NO: 83364 - protein, 43 aa, Artificial Sequence; identical to SEQ ID NO: 19671
  GFR-binding peptide
  MOD_RES (6)..(40)..(42): Xaa is C or S
  MOD_RES (20)..(21)..(22)..(23)..(24): Xaa is A or G
  MOD_RES (25)..(26)..(27)..(28): Xaa is A or G or is absent

SEQ ID NO: 83365 - protein, 40 aa, Artificial Sequence; identical to SEQ ID NO: 18962
  GFR-binding peptide
  MOD_RES (37)..(39): Xaa is C or S

SEQ ID NO: 83366 - protein, 37 aa, Artificial Sequence; identical to SEQ ID NO: 55386
  GFR-binding peptide
  MOD_RES (3)..(4)..(35)..(37): Xaa is C or S

SEQ ID NO: 83367 - protein, 44 aa, Artificial Sequence; identical to SEQ ID NO: 19673
  GFR-binding peptide
  MOD_RES (5)..(42)..(44): Xaa is C or S
  MOD_RES (21)..(22)..(23)..(24)..(25): Xaa is A or G
  MOD_RES (26)..(27)..(28)..(29): Xaa is A or G or is absent

SEQ ID NO: 83368 - protein, 38 aa, Artificial Sequence; identical to SEQ ID NO: 18965
  GFR-binding peptide
  MOD_RES (5)..(5): Xaa is C or S
  MOD_RES (19)..(20)..(21)..(22)..(23): Xaa is A or G
  MOD_RES (24)..(25)..(26)..(27): Xaa is A or G or is absent

SEQ ID NO: 83369 - protein, 35 aa, Artificial Sequence; identical to SEQ ID NO: 18967
  GFR-binding peptide
  MOD_RES (34)..(34): Xaa is C or S

SEQ ID NO: 83370 - protein, 34 aa, Artificial Sequence; identical to SEQ ID NO: 51795
  GFR-binding peptide
  MOD_RES (3)..(4): Xaa is C or S

SEQ ID NO: 83371 - protein, 38 aa, Artificial Sequence; identical to SEQ ID NO: 19674
  GFR-binding peptide
  MOD_RES (6)..(6): Xaa is C or S
  MOD_RES (20)..(21)..(22)..(23)..(24): Xaa is A or G
  MOD_RES (25)..(26)..(27)..(28): Xaa is A or G or is absent

SEQ ID NO: 83372 - protein, 42 aa, Artificial Sequence; identical to SEQ ID NO: 18970
  GFR-binding peptide
  MOD_RES (4)..(41): Xaa is C or S
  MOD_RES (20)..(21)..(22)..(23)..(24): Xaa is A or G
  MOD_RES (25)..(26)..(27)..(28): Xaa is A or G or is absent

SEQ ID NO: 83373 - protein, 36 aa, Artificial Sequence; identical to SEQ ID NO: 19675
  GFR-binding peptide
  MOD_RES (2)..(36): Xaa is C or S
  MOD_RES (16)..(17)..(18)..(19)..(20): Xaa is A or G
  MOD_RES (21)..(22)..(23)..(24): Xaa is A or G or is absent

SEQ ID NO: 83374 - protein, 38 aa, Artificial Sequence; identical to SEQ ID NO: 54194
  GFR-binding peptide
  MOD_RES (5)..(6): Xaa is C or S
  MOD_RES (20)..(21)..(22)..(23)..(24): Xaa is A or G
  MOD_RES (25)..(26)..(27)..(28): Xaa is A or G or is absent

SEQ ID NO: 83375 - protein, 39 aa, Artificial Sequence; identical to SEQ ID NO: 51798
  GFR-binding peptide
  MOD_RES (6)..(7): Xaa is C or S
  MOD_RES (21)..(22)..(23)..(24)..(25): Xaa is A or G
  MOD_RES (26)..(27)..(28)..(29): Xaa is A or G or is absent

SEQ ID NO: 83376 - protein, 37 aa, Artificial Sequence; identical to SEQ ID NO: 54198
  GFR-binding peptide
  MOD_RES (3)..(4)..(37): Xaa is C or S
  MOD_RES (18)..(19)..(20)..(21)..(22): Xaa is A or G
  MOD_RES (23)..(24)..(25)..(26): Xaa is A or G or is absent

SEQ ID NO: 83377 - protein, 40 aa, Artificial Sequence; identical to SEQ ID NO: 19679
  GFR-binding peptide
  MOD_RES (7)..(7): Xaa is C or S
  MOD_RES (21)..(22)..(23)..(24)..(25): Xaa is A or G
  MOD_RES (26)..(27)..(28)..(29): Xaa is A or G or is absent

SEQ ID NO: 83378 - protein, 34 aa, Artificial Sequence; identical to SEQ ID NO: 55394
  GFR-binding peptide
  MOD_RES (33)..(33): Xaa is C or S
  MOD_RES (14)..(15)..(16)..(17)..(18): Xaa is A or G
  MOD_RES (19)..(20)..(21)..(22): Xaa is A or G or is absent

SEQ ID NO: 83379 - protein, 39 aa, Artificial Sequence; identical to SEQ ID NO: 52999
  GFR-binding peptide
  MOD_RES (6)..(7)..(38): Xaa is C or S

SEQ ID NO: 83380 - protein, 38 aa, Artificial Sequence; identical to SEQ ID NO: 55399
  GFR-binding peptide
  MOD_RES (4)..(5)..(36)..(38): Xaa is C or S

SEQ ID NO: 83381 - protein, 36 aa, Artificial Sequence; identical to SEQ ID NO: 54205
  GFR-binding peptide
  MOD_RES (5)..(6): Xaa is C or S

SEQ ID NO: 83382 - protein, 37 aa, Artificial Sequence; identical to SEQ ID NO: 53004
  GFR-binding peptide
  MOD_RES (6)..(7): Xaa is C or S

SEQ ID NO: 83383 - protein, 36 aa, Artificial Sequence; identical to SEQ ID NO: 54208
  GFR-binding peptide
  MOD_RES (1)..(2)..(33)..(35): Xaa is C or S

SEQ ID NO: 83384 - protein, 39 aa, Artificial Sequence; identical to SEQ ID NO: 18977
  GFR-binding peptide
  MOD_RES (37)..(39): Xaa is C or S

SEQ ID NO: 83385 - protein, 36 aa, Artificial Sequence; identical to SEQ ID NO: 51811
  GFR-binding peptide
  MOD_RES (4)..(5)..(36): Xaa is C or S

SEQ ID NO: 83386 - protein, 38 aa, Artificial Sequence; identical to SEQ ID NO: 54211
  GFR-binding peptide
  MOD_RES (2)..(3)..(36)..(38): Xaa is C or S
  MOD_RES (17)..(18)..(19)..(20)..(21): Xaa is A or G
  MOD_RES (22)..(23)..(24)..(25): Xaa is A or G or is absent

SEQ ID NO: 83387 - protein, 39 aa, Artificial Sequence; identical to SEQ ID NO: 54212
  GFR-binding peptide
  MOD_RES (5)..(6)..(37)..(39): Xaa is C or S

SEQ ID NO: 83388 - protein, 37 aa, Artificial Sequence; identical to SEQ ID NO: 55414
  GFR-binding peptide
  MOD_RES (2)..(3)..(34)..(36): Xaa is C or S

SEQ ID NO: 83389 - protein, 33 aa, Artificial Sequence; identical to SEQ ID NO: 54214
  GFR-binding peptide
  MOD_RES (1)..(32): Xaa is C or S

SEQ ID NO: 83390 - protein, 35 aa, Artificial Sequence; identical to SEQ ID NO: 55415
  GFR-binding peptide
  MOD_RES (1)..(34): Xaa is C or S
  MOD_RES (15)..(16)..(17)..(18)..(19): Xaa is A or G
  MOD_RES (20)..(21)..(22)..(23): Xaa is A or G or is absent

SEQ ID NO: 83391 - protein, 34 aa, Artificial Sequence; identical to SEQ ID NO: 54222
  GFR-binding peptide
  MOD_RES (2)..(3)..(34): Xaa is C or S

SEQ ID NO: 83392 - protein, 37 aa, Artificial Sequence; identical to SEQ ID NO: 19684
  GFR-binding peptide
  MOD_RES (37)..(37): Xaa is C or S
  MOD_RES (16)..(17)..(18)..(19)..(20): Xaa is A or G
  MOD_RES (21)..(22)..(23)..(24): Xaa is A or G or is absent

SEQ ID NO: 83393 - protein, 37 aa, Artificial Sequence; identical to SEQ ID NO: 53018
  GFR-binding peptide
  MOD_RES (1)..(2)..(35)..(37): Xaa is C or S
  MOD_RES (16)..(17)..(18)..(19)..(20): Xaa is A or G
  MOD_RES (21)..(22)..(23)..(24): Xaa is A or G or is absent

SEQ ID NO: 83394 - protein, 36 aa, Artificial Sequence; identical to SEQ ID NO: 19685
  GFR-binding peptide
  MOD_RES (2)..(36): Xaa is C or S
  MOD_RES (16)..(17)..(18)..(19)..(20): Xaa is A or G
  MOD_RES (21)..(22)..(23)..(24): Xaa is A or G or is absent

SEQ ID NO: 83395 - protein, 39 aa, Artificial Sequence; identical to SEQ ID NO: 18983
  GFR-binding peptide
  MOD_RES (3)..(37)..(39): Xaa is C or S

SEQ ID NO: 83396 - protein, 30 aa, Artificial Sequence; identical to SEQ ID NO: 53021
  GFR-binding peptide

SEQ ID NO: 83397 - protein, 41 aa, Artificial Sequence; identical to SEQ ID NO: 18984
  GFR-binding peptide
  MOD_RES (5)..(5): Xaa is C or S
  MOD_RES (21)..(22)..(23)..(24)..(25): Xaa is A or G
  MOD_RES (26)..(27)..(28)..(29): Xaa is A or G or is absent

SEQ ID NO: 83398 - protein, 39 aa, Artificial Sequence; identical to SEQ ID NO: 19694
  GFR-binding peptide
  MOD_RES (2)..(39): Xaa is C or S
  MOD_RES (18)..(19)..(20)..(21)..(22): Xaa is A or G
  MOD_RES (23)..(24)..(25)..(26): Xaa is A or G or is absent

SEQ ID NO: 83399 - protein, 34 aa, Artificial Sequence; identical to SEQ ID NO: 18986
  GFR-binding peptide
  MOD_RES (1)..(1): Xaa is C or S
  MOD_RES (15)..(16)..(17)..(18)..(19): Xaa is A or G
  MOD_RES (20)..(21)..(22)..(23): Xaa is A or G or is absent

SEQ ID NO: 83400 - protein, 37 aa, Artificial Sequence; identical to SEQ ID NO: 18987
  GFR-binding peptide
  MOD_RES (1)..(1): Xaa is C or S
  MOD_RES (17)..(18)..(19)..(20)..(21): Xaa is A or G
  MOD_RES (22)..(23)..(24)..(25): Xaa is A or G or is absent

SEQ ID NO: 83401 - protein, 34 aa, Artificial Sequence; identical to SEQ ID NO: 55437
  GFR-binding peptide
  MOD_RES (31)..(33): Xaa is C or S

SEQ ID NO: 83402 - protein, 39 aa, Artificial Sequence; identical to SEQ ID NO: 51836
  GFR-binding peptide
  MOD_RES (4)..(5)..(36)..(38): Xaa is C or S

SEQ ID NO: 83403 - protein, 36 aa, Artificial Sequence; identical to SEQ ID NO: 51840
  GFR-binding peptide
  MOD_RES (3)..(4)..(35): Xaa is C or S

SEQ ID NO: 83404 - protein, 35 aa, Artificial Sequence; identical to SEQ ID NO: 18990
  GFR-binding peptide
  MOD_RES (35)..(35): Xaa is C or S

SEQ ID NO: 83405 - protein, 39 aa, Artificial Sequence; identical to SEQ ID NO: 53035
  GFR-binding peptide
  MOD_RES (4)..(5)..(36)..(38): Xaa is C or S

SEQ ID NO: 83406 - protein, 44 aa, Artificial Sequence; identical to SEQ ID NO: 18993
  GFR-binding peptide
  MOD_RES (7)..(41)..(43): Xaa is C or S
  MOD_RES (21)..(22)..(23)..(24)..(25): Xaa is A or G
  MOD_RES (26)..(27)..(28)..(29): Xaa is A or G or is absent

SEQ ID NO: 83407 - protein, 40 aa, Artificial Sequence; identical to SEQ ID NO: 18994
  GFR-binding peptide
  MOD_RES (3)..(37)..(39): Xaa is C or S
  MOD_RES (17)..(18)..(19)..(20)..(21): Xaa is A or G
  MOD_RES (22)..(23)..(24)..(25): Xaa is A or G or is absent

SEQ ID NO: 83408 - protein, 37 aa, Artificial Sequence; identical to SEQ ID NO: 51847
  GFR-binding peptide
  MOD_RES (3)..(4)..(37): Xaa is C or S
  MOD_RES (18)..(19)..(20)..(21)..(22): Xaa is A or G
  MOD_RES (23)..(24)..(25)..(26): Xaa is A or G or is absent

SEQ ID NO: 83409 - protein, 42 aa, Artificial Sequence; identical to SEQ ID NO: 19705
  GFR-binding peptide
  MOD_RES (7)..(41): Xaa is C or S

SEQ ID NO: 83410 - protein, 42 aa, Artificial Sequence; identical to SEQ ID NO: 18995
  GFR-binding peptide
  MOD_RES (7)..(41): Xaa is C or S

SEQ ID NO: 83411 - protein, 35 aa, Artificial Sequence; identical to SEQ ID NO: 55451
  GFR-binding peptide
  MOD_RES (1)..(2)..(35): Xaa is C or S
  MOD_RES (16)..(17)..(18)..(19)..(20): Xaa is A or G
  MOD_RES (21)..(22)..(23)..(24): Xaa is A or G or is absent

SEQ ID NO: 83412 - protein, 44 aa, Artificial Sequence; identical to SEQ ID NO: 19710
  GFR-binding peptide
  MOD_RES (4)..(41)..(43): Xaa is C or S
  MOD_RES (20)..(21)..(22)..(23)..(24): Xaa is A or G
  MOD_RES (25)..(26)..(27)..(28): Xaa is A or G or is absent

SEQ ID NO: 83413 - protein, 39 aa, Artificial Sequence; identical to SEQ ID NO: 51862
  GFR-binding peptide
  MOD_RES (4)..(5)..(38): Xaa is C or S
  MOD_RES (19)..(20)..(21)..(22)..(23): Xaa is A or G
  MOD_RES (24)..(25)..(26)..(27): Xaa is A or G or is absent

SEQ ID NO: 83414 - protein, 39 aa, Artificial Sequence; identical to SEQ ID NO: 19713
  GFR-binding peptide
  MOD_RES (2)..(39): Xaa is C or S
  MOD_RES (18)..(19)..(20)..(21)..(22): Xaa is A or G
  MOD_RES (23)..(24)..(25)..(26): Xaa is A or G or is absent

SEQ ID NO: 83415 - protein, 36 aa, Artificial Sequence; identical to SEQ ID NO: 18997
  GFR-binding peptide
  MOD_RES (2)..(36): Xaa is C or S

SEQ ID NO: 83416 - protein, 39 aa, Artificial Sequence; identical to SEQ ID NO: 19715
  GFR-binding peptide
  MOD_RES (5)..(5): Xaa is C or S

SEQ ID NO: 83417 - protein, 40 aa, Artificial Sequence; identical to SEQ ID NO: 53060
  GFR-binding peptide
  MOD_RES (4)..(5)..(38)..(40): Xaa is C or S
  MOD_RES (19)..(20)..(21)..(22)..(23): Xaa is A or G
  MOD_RES (24)..(25)..(26)..(27): Xaa is A or G or is absent

SEQ ID NO: 83418 - protein, 37 aa, Artificial Sequence; identical to SEQ ID NO: 55463
  GFR-binding peptide
  MOD_RES (2)..(3)..(36): Xaa is C or S
  MOD_RES (17)..(18)..(19)..(20)..(21): Xaa is A or G
  MOD_RES (22)..(23)..(24)..(25): Xaa is A or G or is absent

SEQ ID NO: 83419 - protein, 34 aa, Artificial Sequence; identical to SEQ ID NO: 19718
  GFR-binding peptide

SEQ ID NO: 83420 - protein, 42 aa, Artificial Sequence; identical to SEQ ID NO: 19720
  GFR-binding peptide
  MOD_RES (2)..(39)..(41): Xaa is C or S
  MOD_RES (18)..(19)..(20)..(21)..(22): Xaa is A or G
  MOD_RES (23)..(24)..(25)..(26): Xaa is A or G or is absent

SEQ ID NO: 83421 - protein, 39 aa, Artificial Sequence; identical to SEQ ID NO: 18998
  GFR-binding peptide
  MOD_RES (4)..(38): Xaa is C or S

SEQ ID NO: 83422 - protein, 36 aa, Artificial Sequence; identical to SEQ ID NO: 18999
  GFR-binding peptide
  MOD_RES (2)..(2): Xaa is C or S
  MOD_RES (18)..(19)..(20)..(21)..(22): Xaa is A or G
  MOD_RES (23)..(24)..(25)..(26): Xaa is A or G or is absent

SEQ ID NO: 83423 - protein, 41 aa, Artificial Sequence; identical to SEQ ID NO: 19002
  GFR-binding peptide
  MOD_RES (4)..(41): Xaa is C or S
  MOD_RES (20)..(21)..(22)..(23)..(24): Xaa is A or G
  MOD_RES (25)..(26)..(27)..(28): Xaa is A or G or is absent

SEQ ID NO: 83424 - protein, 33 aa, Artificial Sequence; identical to SEQ ID NO: 55469
  GFR-binding peptide
  MOD_RES (33)..(33): Xaa is C or S
  MOD_RES (14)..(15)..(16)..(17)..(18): Xaa is A or G
  MOD_RES (19)..(20)..(21)..(22): Xaa is A or G or is absent

SEQ ID NO: 83425 - protein, 34 aa, Artificial Sequence; identical to SEQ ID NO: 54268
  GFR-binding peptide
  MOD_RES (1)..(2)..(33): Xaa is C or S

SEQ ID NO: 83426 - protein, 36 aa, Artificial Sequence; identical to SEQ ID NO: 54272
  GFR-binding peptide
  MOD_RES (5)..(6): Xaa is C or S

SEQ ID NO: 83427 - protein, 43 aa, Artificial Sequence; identical to SEQ ID NO: 19004
  GFR-binding peptide
  MOD_RES (6)..(40)..(42): Xaa is C or S

SEQ ID NO: 83428 - protein, 39 aa, Artificial Sequence; identical to SEQ ID NO: 19725
  GFR-binding peptide
  MOD_RES (1)..(38): Xaa is C or S

SEQ ID NO: 83429 - protein, 37 aa, Artificial Sequence; identical to SEQ ID NO: 19726
  GFR-binding peptide
  MOD_RES (4)..(4): Xaa is C or S

SEQ ID NO: 83430 - protein, 37 aa, Artificial Sequence; identical to SEQ ID NO: 54275
  GFR-binding peptide
  MOD_RES (6)..(7): Xaa is C or S

SEQ ID NO: 83431 - protein, 33 aa, Artificial Sequence; identical to SEQ ID NO: 19006
  GFR-binding peptide

SEQ ID NO: 83432 - protein, 39 aa, Artificial Sequence; identical to SEQ ID NO: 19007
  GFR-binding peptide
  MOD_RES (4)..(4): Xaa is C or S
  MOD_RES (20)..(21)..(22)..(23)..(24): Xaa is A or G
  MOD_RES (25)..(26)..(27)..(28): Xaa is A or G or is absent

SEQ ID NO: 83433 - protein, 42 aa, Artificial Sequence; identical to SEQ ID NO: 19728
  GFR-binding peptide
  MOD_RES (5)..(39)..(41): Xaa is C or S

SEQ ID NO: 83434 - protein, 35 aa, Artificial Sequence; identical to SEQ ID NO: 54277
  GFR-binding peptide
  MOD_RES (2)..(3)..(34): Xaa is C or S

SEQ ID NO: 83435 - protein, 36 aa, Artificial Sequence; identical to SEQ ID NO: 19729
  GFR-binding peptide
  MOD_RES (2)..(2): Xaa is C or S
  MOD_RES (18)..(19)..(20)..(21)..(22): Xaa is A or G
  MOD_RES (23)..(24)..(25)..(26): Xaa is A or G or is absent

SEQ ID NO: 83436 - protein, 36 aa, Artificial Sequence; identical to SEQ ID NO: 19008
  GFR-binding peptide
  MOD_RES (35)..(35): Xaa is C or S

SEQ ID NO: 83437 - protein, 38 aa, Artificial Sequence; identical to SEQ ID NO: 53077
  GFR-binding peptide
  MOD_RES (4)..(5)..(38): Xaa is C or S
  MOD_RES (19)..(20)..(21)..(22)..(23): Xaa is A or G
  MOD_RES (24)..(25)..(26)..(27): Xaa is A or G or is absent

SEQ ID NO: 83438 - protein, 40 aa, Artificial Sequence; identical to SEQ ID NO: 19010
  GFR-binding peptide
  MOD_RES (4)..(38)..(40): Xaa is C or S

SEQ ID NO: 83439 - protein, 40 aa, Artificial Sequence; identical to SEQ ID NO: 19011
  GFR-binding peptide
  MOD_RES (5)..(39): Xaa is C or S

SEQ ID NO: 83440 - protein, 34 aa, Artificial Sequence; identical to SEQ ID NO: 54288
  GFR-binding peptide
  MOD_RES (1)..(2): Xaa is C or S
  MOD_RES (16)..(17)..(18)..(19)..(20): Xaa is A or G
  MOD_RES (21)..(22)..(23)..(24): Xaa is A or G or is absent

SEQ ID NO: 83441 - protein, 35 aa, Artificial Sequence; identical to SEQ ID NO: 53084
  GFR-binding peptide
  MOD_RES (1)..(34): Xaa is C or S
  MOD_RES (15)..(16)..(17)..(18)..(19): Xaa is A or G
  MOD_RES (20)..(21)..(22)..(23): Xaa is A or G or is absent

SEQ ID NO: 83442 - protein, 39 aa, Artificial Sequence; identical to SEQ ID NO: 51890
  GFR-binding peptide
  MOD_RES (4)..(5)..(38): Xaa is C or S
  MOD_RES (19)..(20)..(21)..(22)..(23): Xaa is A or G
  MOD_RES (24)..(25)..(26)..(27): Xaa is A or G or is absent

SEQ ID NO: 83443 - protein, 38 aa, Artificial Sequence; identical to SEQ ID NO: 55495
  GFR-binding peptide
  MOD_RES (3)..(4)..(37): Xaa is C or S
  MOD_RES (18)..(19)..(20)..(21)..(22): Xaa is A or G
  MOD_RES (23)..(24)..(25)..(26): Xaa is A or G or is absent

SEQ ID NO: 83444 - protein, 38 aa, Artificial Sequence; identical to SEQ ID NO: 19740
  GFR-binding peptide
  MOD_RES (2)..(36)..(38): Xaa is C or S

SEQ ID NO: 83445 - protein, 38 aa, Artificial Sequence; identical to SEQ ID NO: 51896
  GFR-binding peptide
  MOD_RES (5)..(6)..(37): Xaa is C or S

SEQ ID NO: 83446 - protein, 39 aa, Artificial Sequence; identical to SEQ ID NO: 19014
  GFR-binding peptide
  MOD_RES (7)..(7): Xaa is C or S

SEQ ID NO: 83447 - protein, 41 aa, Artificial Sequence; identical to SEQ ID NO: 51897
  GFR-binding peptide
  MOD_RES (4)..(5)..(38)..(40): Xaa is C or S
  MOD_RES (19)..(20)..(21)..(22)..(23): Xaa is A or G
  MOD_RES (24)..(25)..(26)..(27): Xaa is A or G or is absent

SEQ ID NO: 83448 - protein, 42 aa, Artificial Sequence; identical to SEQ ID NO: 19742
  GFR-binding peptide
  MOD_RES (3)..(40)..(42): Xaa is C or S
  MOD_RES (19)..(20)..(21)..(22)..(23): Xaa is A or G
  MOD_RES (24)..(25)..(26)..(27): Xaa is A or G or is absent

SEQ ID NO: 83449 - protein, 42 aa, Artificial Sequence; identical to SEQ ID NO: 19743
  GFR-binding peptide
  MOD_RES (5)..(42): Xaa is C or S

SEQ ID NO: 83450 - protein, 33 aa, Artificial Sequence; identical to SEQ ID NO: 19015
  GFR-binding peptide
  MOD_RES (15)..(16)..(17)..(18)..(19): Xaa is A or G
  MOD_RES (20)..(21)..(22)..(23): Xaa is A or G or is absent

SEQ ID NO: 83451 - protein, 34 aa, Artificial Sequence; identical to SEQ ID NO: 51900
  GFR-binding peptide
  MOD_RES (1)..(2): Xaa is C or S
  MOD_RES (16)..(17)..(18)..(19)..(20): Xaa is A or G
  MOD_RES (21)..(22)..(23)..(24): Xaa is A or G or is absent

SEQ ID NO: 83452 - protein, 38 aa, Artificial Sequence; identical to SEQ ID NO: 19018
  GFR-binding peptide
  MOD_RES (3)..(3): Xaa is C or S
  MOD_RES (19)..(20)..(21)..(22)..(23): Xaa is A or G
  MOD_RES (24)..(25)..(26)..(27): Xaa is A or G or is absent

SEQ ID NO: 83453 - protein, 39 aa, Artificial Sequence; identical to SEQ ID NO: 19019
  GFR-binding peptide
  MOD_RES (7)..(7): Xaa is C or S

SEQ ID NO: 83454 - protein, 37 aa, Artificial Sequence; identical to SEQ ID NO: 19021
  GFR-binding peptide
  MOD_RES (1)..(1): Xaa is C or S
  MOD_RES (17)..(18)..(19)..(20)..(21): Xaa is A or G
  MOD_RES (22)..(23)..(24)..(25): Xaa is A or G or is absent

SEQ ID NO: 83455 - protein, 38 aa, Artificial Sequence; identical to SEQ ID NO: 19022
  GFR-binding peptide
  MOD_RES (6)..(6): Xaa is C or S

SEQ ID NO: 83456 - protein, 36 aa, Artificial Sequence; identical to SEQ ID NO: 54321
  GFR-binding peptide
  MOD_RES (2)..(3)..(34)..(36): Xaa is C or S

SEQ ID NO: 83457 - protein, 33 aa, Artificial Sequence; identical to SEQ ID NO: 19024
  GFR-binding peptide
  MOD_RES (15)..(16)..(17)..(18)..(19): Xaa is A or G
  MOD_RES (20)..(21)..(22)..(23): Xaa is A or G or is absent

SEQ ID NO: 83458 - protein, 37 aa, Artificial Sequence; identical to SEQ ID NO: 19026
  GFR-binding peptide
  MOD_RES (36)..(36): Xaa is C or S

SEQ ID NO: 83459 - protein, 38 aa, Artificial Sequence; identical to SEQ ID NO: 19027
  GFR-binding peptide
  MOD_RES (3)..(37): Xaa is C or S
  MOD_RES (17)..(18)..(19)..(20)..(21): Xaa is A or G
  MOD_RES (22)..(23)..(24)..(25): Xaa is A or G or is absent

SEQ ID NO: 83460 - protein, 36 aa, Artificial Sequence; identical to SEQ ID NO: 19028
  GFR-binding peptide
  MOD_RES (16)..(17)..(18)..(19)..(20): Xaa is A or G
  MOD_RES (21)..(22)..(23)..(24): Xaa is A or G or is absent

SEQ ID NO: 83461 - protein, 40 aa, Artificial Sequence; identical to SEQ ID NO: 53114
  GFR-binding peptide
  MOD_RES (4)..(5)..(38)..(40): Xaa is C or S
  MOD_RES (19)..(20)..(21)..(22)..(23): Xaa is A or G
  MOD_RES (24)..(25)..(26)..(27): Xaa is A or G or is absent

SEQ ID NO: 83462 - protein, 38 aa, Artificial Sequence; identical to SEQ ID NO: 19029
  GFR-binding peptide
  MOD_RES (2)..(36)..(38): Xaa is C or S
  MOD_RES (16)..(17)..(18)..(19)..(20): Xaa is A or G
  MOD_RES (21)..(22)..(23)..(24): Xaa is A or G or is absent

SEQ ID NO: 83463 - protein, 38 aa, Artificial Sequence; identical to SEQ ID NO: 55519
  GFR-binding peptide
  MOD_RES (3)..(4)..(35)..(37): Xaa is C or S

SEQ ID NO: 83464 - protein, 35 aa, Artificial Sequence; identical to SEQ ID NO: 51911
  GFR-binding peptide
  MOD_RES (4)..(5): Xaa is C or S

SEQ ID NO: 83465 - protein, 36 aa, Artificial Sequence; identical to SEQ ID NO: 19030
  GFR-binding peptide
  MOD_RES (35)..(35): Xaa is C or S
  MOD_RES (14)..(15)..(16)..(17)..(18): Xaa is A or G
  MOD_RES (19)..(20)..(21)..(22): Xaa is A or G or is absent

SEQ ID NO: 83466 - protein, 36 aa, Artificial Sequence; identical to SEQ ID NO: 55522
  GFR-binding peptide
  MOD_RES (5)..(6): Xaa is C or S

SEQ ID NO: 83467 - protein, 41 aa, Artificial Sequence; identical to SEQ ID NO: 19749
  GFR-binding peptide
  MOD_RES (3)..(40): Xaa is C or S
  MOD_RES (19)..(20)..(21)..(22)..(23): Xaa is A or G
  MOD_RES (24)..(25)..(26)..(27): Xaa is A or G or is absent

SEQ ID NO: 83468 - protein, 35 aa, Artificial Sequence; identical to SEQ ID NO: 54334
  GFR-binding peptide
  MOD_RES (33)..(35): Xaa is C or S
  MOD_RES (14)..(15)..(16)..(17)..(18): Xaa is A or G
  MOD_RES (19)..(20)..(21)..(22): Xaa is A or G or is absent

SEQ ID NO: 83469 - protein, 35 aa, Artificial Sequence; identical to SEQ ID NO: 19751
  GFR-binding peptide
  MOD_RES (15)..(16)..(17)..(18)..(19): Xaa is A or G
  MOD_RES (20)..(21)..(22)..(23): Xaa is A or G or is absent

SEQ ID NO: 83470 - protein, 36 aa, Artificial Sequence; identical to SEQ ID NO: 53119
  GFR-binding peptide
  MOD_RES (1)..(2)..(35): Xaa is C or S
  MOD_RES (16)..(17)..(18)..(19)..(20): Xaa is A or G
  MOD_RES (21)..(22)..(23)..(24): Xaa is A or G or is absent

SEQ ID NO: 83471 - protein, 34 aa, Artificial Sequence; identical to SEQ ID NO: 51922
  GFR-binding peptide
  MOD_RES (1)..(2): Xaa is C or S
  MOD_RES (16)..(17)..(18)..(19)..(20): Xaa is A or G
  MOD_RES (21)..(22)..(23)..(24): Xaa is A or G or is absent

SEQ ID NO: 83472 - protein, 36 aa, Artificial Sequence; identical to SEQ ID NO: 54337
  GFR-binding peptide
  MOD_RES (2)..(3)..(34)..(36): Xaa is C or S

SEQ ID NO: 83473 - protein, 34 aa, Artificial Sequence; identical to SEQ ID NO: 54338
  GFR-binding peptide
  MOD_RES (1)..(2): Xaa is C or S
  MOD_RES (16)..(17)..(18)..(19)..(20): Xaa is A or G
  MOD_RES (21)..(22)..(23)..(24): Xaa is A or G or is absent

SEQ ID NO: 83474 - protein, 39 aa, Artificial Sequence; identical to SEQ ID NO: 19753
  GFR-binding peptide
  MOD_RES (5)..(39): Xaa is C or S
  MOD_RES (19)..(20)..(21)..(22)..(23): Xaa is A or G
  MOD_RES (24)..(25)..(26)..(27): Xaa is A or G or is absent

SEQ ID NO: 83475 - protein, 33 aa, Artificial Sequence; identical to SEQ ID NO: 53124
  GFR-binding peptide
  MOD_RES (1)..(32): Xaa is C or S

SEQ ID NO: 83476 - protein, 40 aa, Artificial Sequence; identical to SEQ ID NO: 19036
  GFR-binding peptide
  MOD_RES (4)..(38)..(40): Xaa is C or S
  MOD_RES (18)..(19)..(20)..(21)..(22): Xaa is A or G
  MOD_RES (23)..(24)..(25)..(26): Xaa is A or G or is absent

SEQ ID NO: 83477 - protein, 36 aa, Artificial Sequence; identical to SEQ ID NO: 19754
  GFR-binding peptide
  MOD_RES (3)..(3): Xaa is C or S

SEQ ID NO: 83478 - protein, 43 aa, Artificial Sequence; identical to SEQ ID NO: 19037
  GFR-binding peptide
  MOD_RES (6)..(40)..(42): Xaa is C or S
  MOD_RES (20)..(21)..(22)..(23)..(24): Xaa is A or G
  MOD_RES (25)..(26)..(27)..(28): Xaa is A or G or is absent

SEQ ID NO: 83479 - protein, 42 aa, Artificial Sequence; identical to SEQ ID NO: 19756
  GFR-binding peptide
  MOD_RES (7)..(41): Xaa is C or S
  MOD_RES (21)..(22)..(23)..(24)..(25): Xaa is A or G
  MOD_RES (26)..(27)..(28)..(29): Xaa is A or G or is absent

SEQ ID NO: 83480 - protein, 36 aa, Artificial Sequence; identical to SEQ ID NO: 19757
  GFR-binding peptide
  MOD_RES (1)..(35): Xaa is C or S

SEQ ID NO: 83481 - protein, 38 aa, Artificial Sequence; identical to SEQ ID NO: 19761
  GFR-binding peptide
  MOD_RES (5)..(5): Xaa is C or S

SEQ ID NO: 83482 - protein, 40 aa, Artificial Sequence; identical to SEQ ID NO: 53133
  GFR-binding peptide
  MOD_RES (6)..(7)..(38)..(40): Xaa is C or S

SEQ ID NO: 83483 - protein, 33 aa, Artificial Sequence; identical to SEQ ID NO: 54349
  GFR-binding peptide
  MOD_RES (2)..(3): Xaa is C or S

SEQ ID NO: 83484 - protein, 35 aa, Artificial Sequence; identical to SEQ ID NO: 19762
  GFR-binding peptide
  MOD_RES (34)..(34): Xaa is C or S

SEQ ID NO: 83485 - protein, 39 aa, Artificial Sequence; identical to SEQ ID NO: 19763
  GFR-binding peptide
  MOD_RES (36)..(38): Xaa is C or S
  MOD_RES (15)..(16)..(17)..(18)..(19): Xaa is A or G
  MOD_RES (20)..(21)..(22)..(23): Xaa is A or G or is absent

SEQ ID NO: 83486 - protein, 40 aa, Artificial Sequence; identical to SEQ ID NO: 19042
  GFR-binding peptide
  MOD_RES (5)..(5): Xaa is C or S
  MOD_RES (21)..(22)..(23)..(24)..(25): Xaa is A or G
  MOD_RES (26)..(27)..(28)..(29): Xaa is A or G or is absent

SEQ ID NO: 83487 - protein, 37 aa, Artificial Sequence; identical to SEQ ID NO: 53139
  GFR-binding peptide
  MOD_RES (4)..(5): Xaa is C or S
  MOD_RES (19)..(20)..(21)..(22)..(23): Xaa is A or G
  MOD_RES (24)..(25)..(26)..(27): Xaa is A or G or is absent

SEQ ID NO: 83488 - protein, 37 aa, Artificial Sequence; identical to SEQ ID NO: 54353
  GFR-binding peptide
  MOD_RES (4)..(5): Xaa is C or S
  MOD_RES (19)..(20)..(21)..(22)..(23): Xaa is A or G
  MOD_RES (24)..(25)..(26)..(27): Xaa is A or G or is absent

SEQ ID NO: 83489 - protein, 32 aa, Artificial Sequence; identical to SEQ ID NO: 53140
  GFR-binding peptide
  MOD_RES (1)..(2): Xaa is C or S

SEQ ID NO: 83490 - protein, 34 aa, Artificial Sequence; identical to SEQ ID NO: 51939
  GFR-binding peptide
  MOD_RES (33)..(33): Xaa is C or S
  MOD_RES (14)..(15)..(16)..(17)..(18): Xaa is A or G
  MOD_RES (19)..(20)..(21)..(22): Xaa is A or G or is absent

SEQ ID NO: 83491 - protein, 37 aa, Artificial Sequence; identical to SEQ ID NO: 19765
  GFR-binding peptide
  MOD_RES (5)..(5): Xaa is C or S
  MOD_RES (19)..(20)..(21)..(22)..(23): Xaa is A or G
  MOD_RES (24)..(25)..(26)..(27): Xaa is A or G or is absent

SEQ ID NO: 83492 - protein, 36 aa, Artificial Sequence; identical to SEQ ID NO: 53144
  GFR-binding peptide
  MOD_RES (2)..(3)..(36): Xaa is C or S
  MOD_RES (17)..(18)..(19)..(20)..(21): Xaa is A or G
  MOD_RES (22)..(23)..(24)..(25): Xaa is A or G or is absent

SEQ ID NO: 83493 - protein, 39 aa, Artificial Sequence; identical to SEQ ID NO: 19766
  GFR-binding peptide
  MOD_RES (2)..(36)..(38): Xaa is C or S
  MOD_RES (16)..(17)..(18)..(19)..(20): Xaa is A or G
  MOD_RES (21)..(22)..(23)..(24): Xaa is A or G or is absent

SEQ ID NO: 83494 - protein, 40 aa, Artificial Sequence; identical to SEQ ID NO: 19767
  GFR-binding peptide
  MOD_RES (7)..(7): Xaa is C or S

SEQ ID NO: 83495 - protein, 39 aa, Artificial Sequence; identical to SEQ ID NO: 19045
  GFR-binding peptide
  MOD_RES (5)..(39): Xaa is C or S

SEQ ID NO: 83496 - protein, 35 aa, Artificial Sequence; identical to SEQ ID NO: 19769
  GFR-binding peptide
  MOD_RES (2)..(2): Xaa is C or S

SEQ ID NO: 83497 - protein, 41 aa, Artificial Sequence; identical to SEQ ID NO: 19046
  GFR-binding peptide
  MOD_RES (5)..(39)..(41): Xaa is C or S

SEQ ID NO: 83498 - protein, 31 aa, Artificial Sequence; identical to SEQ ID NO: 53148
  GFR-binding peptide
  MOD_RES (1)..(1): Xaa is C or S

SEQ ID NO: 83499 - protein, 38 aa, Artificial Sequence; identical to SEQ ID NO: 19771
  GFR-binding peptide
  MOD_RES (4)..(38): Xaa is C or S

SEQ ID NO: 83500 - protein, 38 aa, Artificial Sequence; identical to SEQ ID NO: 19773
  GFR-binding peptide
  MOD_RES (35)..(37): Xaa is C or S
  MOD_RES (14)..(15)..(16)..(17)..(18): Xaa is A or G
  MOD_RES (19)..(20)..(21)..(22): Xaa is A or G or is absent

SEQ ID NO: 83501 - protein, 35 aa, Artificial Sequence; identical to SEQ ID NO: 19774
  GFR-binding peptide
  MOD_RES (1)..(1): Xaa is C or S

SEQ ID NO: 83502 - protein, 38 aa, Artificial Sequence; identical to SEQ ID NO: 19050
  GFR-binding peptide
  MOD_RES (36)..(38): Xaa is C or S

SEQ ID NO: 83503 - protein, 39 aa, Artificial Sequence; identical to SEQ ID NO: 19776
  GFR-binding peptide
  MOD_RES (7)..(7): Xaa is C or S
  MOD_RES (21)..(22)..(23)..(24)..(25): Xaa is A or G
  MOD_RES (26)..(27)..(28)..(29): Xaa is A or G or is absent

SEQ ID NO: 83504 - protein, 39 aa, Artificial Sequence; identical to SEQ ID NO: 54365
  GFR-binding peptide
  MOD_RES (2)..(3)..(36)..(38): Xaa is C or S
  MOD_RES (17)..(18)..(19)..(20)..(21): Xaa is A or G
  MOD_RES (22)..(23)..(24)..(25): Xaa is A or G or is absent

SEQ ID NO: 83505 - protein, 36 aa, Artificial Sequence; identical to SEQ ID NO: 19777
  GFR-binding peptide
  MOD_RES (1)..(35): Xaa is C or S

SEQ ID NO: 83506 - protein, 40 aa, Artificial Sequence; identical to SEQ ID NO: 19055
  GFR-binding peptide
  MOD_RES (6)..(40): Xaa is C or S

SEQ ID NO: 83507 - protein, 35 aa, Artificial Sequence; identical to SEQ ID NO: 55570
  GFR-binding peptide
  MOD_RES (1)..(2)..(35): Xaa is C or S
  MOD_RES (16)..(17)..(18)..(19)..(20): Xaa is A or G
  MOD_RES (21)..(22)..(23)..(24): Xaa is A or G or is absent

SEQ ID NO: 83508 - protein, 39 aa, Artificial Sequence; identical to SEQ ID NO: 19056
  GFR-binding peptide
  MOD_RES (3)..(3): Xaa is C or S
  MOD_RES (19)..(20)..(21)..(22)..(23): Xaa is A or G
  MOD_RES (24)..(25)..(26)..(27): Xaa is A or G or is absent

SEQ ID NO: 83509 - protein, 35 aa, Artificial Sequence; identical to SEQ ID NO: 19778
  GFR-binding peptide
  MOD_RES (2)..(2): Xaa is C or S

SEQ ID NO: 83510 - protein, 37 aa, Artificial Sequence; identical to SEQ ID NO: 51954
  GFR-binding peptide
  MOD_RES (3)..(4)..(37): Xaa is C or S
  MOD_RES (18)..(19)..(20)..(21)..(22): Xaa is A or G
  MOD_RES (23)..(24)..(25)..(26): Xaa is A or G or is absent

SEQ ID NO: 83511 - protein, 41 aa, Artificial Sequence; identical to SEQ ID NO: 53161
  GFR-binding peptide
  MOD_RES (6)..(7)..(40): Xaa is C or S
  MOD_RES (21)..(22)..(23)..(24)..(25): Xaa is A or G
  MOD_RES (26)..(27)..(28)..(29): Xaa is A or G or is absent

SEQ ID NO: 83512 - protein, 30 aa, Artificial Sequence; identical to SEQ ID NO: 54369
  GFR-binding peptide

SEQ ID NO: 83513 - protein, 38 aa, Artificial Sequence; identical to SEQ ID NO: 19058
  GFR-binding peptide
  MOD_RES (2)..(36)..(38): Xaa is C or S

SEQ ID NO: 83514 - protein, 32 aa, Artificial Sequence; identical to SEQ ID NO: 54373
  GFR-binding peptide
  MOD_RES (1)..(32): Xaa is C or S

SEQ ID NO: 83515 - protein, 43 aa, Artificial Sequence; identical to SEQ ID NO: 55572
  GFR-binding peptide
  MOD_RES (6)..(7)..(40)..(42): Xaa is C or S
  MOD_RES (21)..(22)..(23)..(24)..(25): Xaa is A or G
  MOD_RES (26)..(27)..(28)..(29): Xaa is A or G or is absent

SEQ ID NO: 83516 - protein, 37 aa, Artificial Sequence; identical to SEQ ID NO: 54377
  GFR-binding peptide
  MOD_RES (1)..(34)..(36): Xaa is C or S
  MOD_RES (15)..(16)..(17)..(18)..(19): Xaa is A or G
  MOD_RES (20)..(21)..(22)..(23): Xaa is A or G or is absent

SEQ ID NO: 83517 - protein, 41 aa, Artificial Sequence; identical to SEQ ID NO: 54378
  GFR-binding peptide
  MOD_RES (4)..(5)..(38)..(40): Xaa is C or S
  MOD_RES (19)..(20)..(21)..(22)..(23): Xaa is A or G
  MOD_RES (24)..(25)..(26)..(27): Xaa is A or G or is absent

SEQ ID NO: 83518 - protein, 35 aa, Artificial Sequence; identical to SEQ ID NO: 19785
  GFR-binding peptide
  MOD_RES (3)..(3): Xaa is C or S

SEQ ID NO: 83519 - protein, 32 aa, Artificial Sequence; identical to SEQ ID NO: 19788
  GFR-binding peptide
  MOD_RES (14)..(15)..(16)..(17)..(18): Xaa is A or G
  MOD_RES (19)..(20)..(21)..(22): Xaa is A or G or is absent

SEQ ID NO: 83520 - protein, 40 aa, Artificial Sequence; identical to SEQ ID NO: 51963
  GFR-binding peptide
  MOD_RES (6)..(7)..(38)..(40): Xaa is C or S

SEQ ID NO: 83521 - protein, 33 aa, Artificial Sequence; identical to SEQ ID NO: 54381
  GFR-binding peptide
  MOD_RES (1)..(32): Xaa is C or S

SEQ ID NO: 83522 - protein, 36 aa, Artificial Sequence; identical to SEQ ID NO: 19789
  GFR-binding peptide
  MOD_RES (1)..(1): Xaa is C or S

SEQ ID NO: 83523 - protein, 44 aa, Artificial Sequence; identical to SEQ ID NO: 19791
  GFR-binding peptide
  MOD_RES (4)..(41)..(43): Xaa is C or S
  MOD_RES (20)..(21)..(22)..(23)..(24): Xaa is A or G
  MOD_RES (25)..(26)..(27)..(28): Xaa is A or G or is absent

SEQ ID NO: 83524 - protein, 41 aa, Artificial Sequence; identical to SEQ ID NO: 19063
  GFR-binding peptide
  MOD_RES (5)..(5): Xaa is C or S
  MOD_RES (21)..(22)..(23)..(24)..(25): Xaa is A or G
  MOD_RES (26)..(27)..(28)..(29): Xaa is A or G or is absent

SEQ ID NO: 83525 - protein, 40 aa, Artificial Sequence; identical to SEQ ID NO: 54386
  GFR-binding peptide
  MOD_RES (3)..(4)..(37)..(39): Xaa is C or S
  MOD_RES (18)..(19)..(20)..(21)..(22): Xaa is A or G
  MOD_RES (23)..(24)..(25)..(26): Xaa is A or G or is absent

SEQ ID NO: 83526 - protein, 37 aa, Artificial Sequence; identical to SEQ ID NO: 19064
  GFR-binding peptide
  MOD_RES (1)..(35)..(37): Xaa is C or S

SEQ ID NO: 83527 - protein, 45 aa, Artificial Sequence; identical to SEQ ID NO: 19066
  GFR-binding peptide
  MOD_RES (5)..(42)..(44): Xaa is C or S
  MOD_RES (21)..(22)..(23)..(24)..(25): Xaa is A or G
  MOD_RES (26)..(27)..(28)..(29): Xaa is A or G or is absent

SEQ ID NO: 83528 - protein, 38 aa, Artificial Sequence; identical to SEQ ID NO: 19067
  GFR-binding peptide
  MOD_RES (35)..(37): Xaa is C or S
  MOD_RES (14)..(15)..(16)..(17)..(18): Xaa is A or G
  MOD_RES (19)..(20)..(21)..(22): Xaa is A or G or is absent

SEQ ID NO: 83529 - protein, 34 aa, Artificial Sequence; identical to SEQ ID NO: 51968
  GFR-binding peptide
  MOD_RES (33)..(33): Xaa is C or S
  MOD_RES (14)..(15)..(16)..(17)..(18): Xaa is A or G
  MOD_RES (19)..(20)..(21)..(22): Xaa is A or G or is absent

SEQ ID NO: 83530 - protein, 36 aa, Artificial Sequence; identical to SEQ ID NO: 55583
  GFR-binding peptide
  MOD_RES (3)..(4): Xaa is C or S
  MOD_RES (18)..(19)..(20)..(21)..(22): Xaa is A or G
  MOD_RES (23)..(24)..(25)..(26): Xaa is A or G or is absent

SEQ ID NO: 83531 - protein, 33 aa, Artificial Sequence; identical to SEQ ID NO: 53181
  GFR-binding peptide
  MOD_RES (1)..(1): Xaa is C or S
  MOD_RES (15)..(16)..(17)..(18)..(19): Xaa is A or G
  MOD_RES (20)..(21)..(22)..(23): Xaa is A or G or is absent

SEQ ID NO: 83532 - protein, 33 aa, Artificial Sequence; identical to SEQ ID NO: 55588
  GFR-binding peptide
  MOD_RES (1)..(1): Xaa is C or S
  MOD_RES (15)..(16)..(17)..(18)..(19): Xaa is A or G
  MOD_RES (20)..(21)..(22)..(23): Xaa is A or G or is absent

SEQ ID NO: 83533 - protein, 39 aa, Artificial Sequence; identical to SEQ ID NO: 19793
  GFR-binding peptide
  MOD_RES (2)..(36)..(38): Xaa is C or S
  MOD_RES (16)..(17)..(18)..(19)..(20): Xaa is A or G
  MOD_RES (21)..(22)..(23)..(24): Xaa is A or G or is absent

SEQ ID NO: 83534 - protein, 38 aa, Artificial Sequence; identical to SEQ ID NO: 51974
  GFR-binding peptide
  MOD_RES (6)..(7)..(38): Xaa is C or S

SEQ ID NO: 83535 - protein, 36 aa, Artificial Sequence; identical to SEQ ID NO: 55591
  GFR-binding peptide
  MOD_RES (3)..(4): Xaa is C or S
  MOD_RES (18)..(19)..(20)..(21)..(22): Xaa is A or G
  MOD_RES (23)..(24)..(25)..(26): Xaa is A or G or is absent

SEQ ID NO: 83536 - protein, 37 aa, Artificial Sequence; identical to SEQ ID NO: 53187
  GFR-binding peptide
  MOD_RES (1)..(2)..(35)..(37): Xaa is C or S
  MOD_RES (16)..(17)..(18)..(19)..(20): Xaa is A or G
  MOD_RES (21)..(22)..(23)..(24): Xaa is A or G or is absent

SEQ ID NO: 83537 - protein, 40 aa, Artificial Sequence; identical to SEQ ID NO: 54400
  GFR-binding peptide
  MOD_RES (5)..(6)..(39): Xaa is C or S
  MOD_RES (20)..(21)..(22)..(23)..(24): Xaa is A or G
  MOD_RES (25)..(26)..(27)..(28): Xaa is A or G or is absent

SEQ ID NO: 83538 - protein, 42 aa, Artificial Sequence; identical to SEQ ID NO: 19071
  GFR-binding peptide
  MOD_RES (7)..(41): Xaa is C or S

SEQ ID NO: 83539 - protein, 39 aa, Artificial Sequence; identical to SEQ ID NO: 19795
  GFR-binding peptide
  MOD_RES (4)..(4): Xaa is C or S
  MOD_RES (20)..(21)..(22)..(23)..(24): Xaa is A or G
  MOD_RES (25)..(26)..(27)..(28): Xaa is A or G or is absent

SEQ ID NO: 83540 - protein, 41 aa, Artificial Sequence; identical to SEQ ID NO: 54404
  GFR-binding peptide
  MOD_RES (5)..(6)..(39)..(41): Xaa is C or S
  MOD_RES (20)..(21)..(22)..(23)..(24): Xaa is A or G
  MOD_RES (25)..(26)..(27)..(28): Xaa is A or G or is absent

SEQ ID NO: 83541 - protein, 38 aa, Artificial Sequence; identical to SEQ ID NO: 53192
  GFR-binding peptide
  MOD_RES (2)..(3)..(36)..(38): Xaa is C or S
  MOD_RES (17)..(18)..(19)..(20)..(21): Xaa is A or G
  MOD_RES (22)..(23)..(24)..(25): Xaa is A or G or is absent

SEQ ID NO: 83542 - protein, 38 aa, Artificial Sequence; identical to SEQ ID NO: 19075
  GFR-binding peptide
  MOD_RES (36)..(38): Xaa is C or S

SEQ ID NO: 83543 - protein, 34 aa, Artificial Sequence; identical to SEQ ID NO: 19796
  GFR-binding peptide
  MOD_RES (2)..(2): Xaa is C or S
  MOD_RES (16)..(17)..(18)..(19)..(20): Xaa is A or G
  MOD_RES (21)..(22)..(23)..(24): Xaa is A or G or is absent

SEQ ID NO: 83544 - protein, 37 aa, Artificial Sequence; identical to SEQ ID NO: 53193
  GFR-binding peptide
  MOD_RES (3)..(4)..(37): Xaa is C or S
  MOD_RES (18)..(19)..(20)..(21)..(22): Xaa is A or G
  MOD_RES (23)..(24)..(25)..(26): Xaa is A or G or is absent

SEQ ID NO: 83545 - protein, 35 aa, Artificial Sequence; identical to SEQ ID NO: 19797
  GFR-binding peptide
  MOD_RES (16)..(17)..(18)..(19)..(20): Xaa is A or G
  MOD_RES (21)..(22)..(23)..(24): Xaa is A or G or is absent

SEQ ID NO: 83546 - protein, 33 aa, Artificial Sequence; identical to SEQ ID NO: 54411
  GFR-binding peptide
  MOD_RES (33)..(33): Xaa is C or S
  MOD_RES (14)..(15)..(16)..(17)..(18): Xaa is A or G
  MOD_RES (19)..(20)..(21)..(22): Xaa is A or G or is absent

SEQ ID NO: 83547 - protein, 43 aa, Artificial Sequence; identical to SEQ ID NO: 19798
  GFR-binding peptide
  MOD_RES (3)..(40)..(42): Xaa is C or S
  MOD_RES (19)..(20)..(21)..(22)..(23): Xaa is A or G
  MOD_RES (24)..(25)..(26)..(27): Xaa is A or G or is absent

SEQ ID NO: 83548 - protein, 39 aa, Artificial Sequence; identical to SEQ ID NO: 54413
  GFR-binding peptide
  MOD_RES (2)..(3)..(36)..(38): Xaa is C or S
  MOD_RES (17)..(18)..(19)..(20)..(21): Xaa is A or G
  MOD_RES (22)..(23)..(24)..(25): Xaa is A or G or is absent

SEQ ID NO: 83549 - protein, 39 aa, Artificial Sequence; identical to SEQ ID NO: 19077
  GFR-binding peptide
  MOD_RES (2)..(39): Xaa is C or S
  MOD_RES (18)..(19)..(20)..(21)..(22): Xaa is A or G
  MOD_RES (23)..(24)..(25)..(26): Xaa is A or G or is absent

SEQ ID NO: 83550 - protein, 40 aa, Artificial Sequence; identical to SEQ ID NO: 19078
  GFR-binding peptide
  MOD_RES (6)..(40): Xaa is C or S

SEQ ID NO: 83551 - protein, 37 aa, Artificial Sequence; identical to SEQ ID NO: 54414
  GFR-binding peptide
  MOD_RES (3)..(4)..(37): Xaa is C or S
  MOD_RES (18)..(19)..(20)..(21)..(22): Xaa is A or G
  MOD_RES (23)..(24)..(25)..(26): Xaa is A or G or is absent

SEQ ID NO: 83552 - protein, 38 aa, Artificial Sequence; identical to SEQ ID NO: 55607
  GFR-binding peptide
  MOD_RES (3)..(4)..(35)..(37): Xaa is C or S

SEQ ID NO: 83553 - protein, 34 aa, Artificial Sequence; identical to SEQ ID NO: 53199
  GFR-binding peptide
  MOD_RES (33)..(33): Xaa is C or S
  MOD_RES (14)..(15)..(16)..(17)..(18): Xaa is A or G
  MOD_RES (19)..(20)..(21)..(22): Xaa is A or G or is absent

SEQ ID NO: 83554 - protein, 40 aa, Artificial Sequence; identical to SEQ ID NO: 53200
  GFR-binding peptide
  MOD_RES (5)..(6)..(37)..(39): Xaa is C or S

SEQ ID NO: 83555 - protein, 34 aa, Artificial Sequence; identical to SEQ ID NO: 55610
  GFR-binding peptide
  MOD_RES (33)..(33): Xaa is C or S
  MOD_RES (14)..(15)..(16)..(17)..(18): Xaa is A or G
  MOD_RES (19)..(20)..(21)..(22): Xaa is A or G or is absent

SEQ ID NO: 83556 - protein, 39 aa, Artificial Sequence; identical to SEQ ID NO: 19079
  GFR-binding peptide
  MOD_RES (5)..(39): Xaa is C or S
  MOD_RES (19)..(20)..(21)..(22)..(23): Xaa is A or G
  MOD_RES (24)..(25)..(26)..(27): Xaa is A or G or is absent

SEQ ID NO: 83557 - protein, 42 aa, Artificial Sequence; identical to SEQ ID NO: 19080
  GFR-binding peptide
  MOD_RES (6)..(40)..(42): Xaa is C or S
  MOD_RES (20)..(21)..(22)..(23)..(24): Xaa is A or G
  MOD_RES (25)..(26)..(27)..(28): Xaa is A or G or is absent

SEQ ID NO: 83558 - protein, 41 aa, Artificial Sequence; identical to SEQ ID NO: 53204
  GFR-binding peptide
  MOD_RES (6)..(7)..(38)..(40): Xaa is C or S

SEQ ID NO: 83559 - protein, 39 aa, Artificial Sequence; identical to SEQ ID NO: 19081
  GFR-binding peptide
  MOD_RES (36)..(38): Xaa is C or S

SEQ ID NO: 83560 - protein, 40 aa, Artificial Sequence; identical to SEQ ID NO: 19801
  GFR-binding peptide
  MOD_RES (5)..(39): Xaa is C or S
  MOD_RES (19)..(20)..(21)..(22)..(23): Xaa is A or G
  MOD_RES (24)..(25)..(26)..(27): Xaa is A or G or is absent

SEQ ID NO: 83561 - protein, 36 aa, Artificial Sequence; identical to SEQ ID NO: 54424
  GFR-binding peptide
  MOD_RES (2)..(3)..(34)..(36): Xaa is C or S

SEQ ID NO: 83562 - protein, 31 aa, Artificial Sequence; identical to SEQ ID NO: 55615
  GFR-binding peptide
  MOD_RES (1)..(1): Xaa is C or S

SEQ ID NO: 83563 - protein, 42 aa, Artificial Sequence; identical to SEQ ID NO: 54426
  GFR-binding peptide
  MOD_RES (5)..(6)..(39)..(41): Xaa is C or S
  MOD_RES (20)..(21)..(22)..(23)..(24): Xaa is A or G
  MOD_RES (25)..(26)..(27)..(28): Xaa is A or G or is absent

SEQ ID NO: 83564 - protein, 35 aa, Artificial Sequence; identical to SEQ ID NO: 19802
  GFR-binding peptide
  MOD_RES (34)..(34): Xaa is C or S
  MOD_RES (14)..(15)..(16)..(17)..(18): Xaa is A or G
  MOD_RES (19)..(20)..(21)..(22): Xaa is A or G or is absent

SEQ ID NO: 83565 - protein, 37 aa, Artificial Sequence; identical to SEQ ID NO: 19085
  GFR-binding peptide
  MOD_RES (37)..(37): Xaa is C or S
  MOD_RES (16)..(17)..(18)..(19)..(20): Xaa is A or G
  MOD_RES (21)..(22)..(23)..(24): Xaa is A or G or is absent

SEQ ID NO: 83566 - protein, 39 aa, Artificial Sequence; identical to SEQ ID NO: 52002
  GFR-binding peptide
  MOD_RES (4)..(5)..(36)..(38): Xaa is C or S

SEQ ID NO: 83567 - protein, 37 aa, Artificial Sequence; identical to SEQ ID NO: 19087
  GFR-binding peptide
  MOD_RES (5)..(5): Xaa is C or S
  MOD_RES (19)..(20)..(21)..(22)..(23): Xaa is A or G
  MOD_RES (24)..(25)..(26)..(27): Xaa is A or G or is absent

SEQ ID NO: 83568 - protein, 40 aa, Artificial Sequence; identical to SEQ ID NO: 19803
  GFR-binding peptide
  MOD_RES (5)..(39): Xaa is C or S
  MOD_RES (19)..(20)..(21)..(22)..(23): Xaa is A or G
  MOD_RES (24)..(25)..(26)..(27): Xaa is A or G or is absent

SEQ ID NO: 83569 - protein, 39 aa, Artificial Sequence; identical to SEQ ID NO: 19804
  GFR-binding peptide
  MOD_RES (37)..(39): Xaa is C or S
  MOD_RES (16)..(17)..(18)..(19)..(20): Xaa is A or G
  MOD_RES (21)..(22)..(23)..(24): Xaa is A or G or is absent

SEQ ID NO: 83570 - protein, 41 aa, Artificial Sequence; identical to SEQ ID NO: 55618
  GFR-binding peptide
  MOD_RES (5)..(6)..(39)..(41): Xaa is C or S
  MOD_RES (20)..(21)..(22)..(23)..(24): Xaa is A or G
  MOD_RES (25)..(26)..(27)..(28): Xaa is A or G or is absent

SEQ ID NO: 83571 - protein, 36 aa, Artificial Sequence; identical to SEQ ID NO: 54434
  GFR-binding peptide
  MOD_RES (2)..(3)..(34)..(36): Xaa is C or S

SEQ ID NO: 83572 - protein, 39 aa, Artificial Sequence; identical to SEQ ID NO: 19088
  GFR-binding peptide
  MOD_RES (5)..(39): Xaa is C or S

SEQ ID NO: 83573 - protein, 38 aa, Artificial Sequence; identical to SEQ ID NO: 52005
  GFR-binding peptide
  MOD_RES (1)..(2)..(35)..(37): Xaa is C or S
  MOD_RES (16)..(17)..(18)..(19)..(20): Xaa is A or G
  MOD_RES (21)..(22)..(23)..(24): Xaa is A or G or is absent

SEQ ID NO: 83574 - protein, 36 aa, Artificial Sequence; identical to SEQ ID NO: 19805
  GFR-binding peptide
  MOD_RES (16)..(17)..(18)..(19)..(20): Xaa is A or G
  MOD_RES (21)..(22)..(23)..(24): Xaa is A or G or is absent

SEQ ID NO: 83575 - protein, 31 aa, Artificial Sequence; identical to SEQ ID NO: 53218
  GFR-binding peptide
  MOD_RES (31)..(31): Xaa is C or S

SEQ ID NO: 83576 - protein, 36 aa, Artificial Sequence; identical to SEQ ID NO: 19806
  GFR-binding peptide
  MOD_RES (2)..(36): Xaa is C or S
  MOD_RES (16)..(17)..(18)..(19)..(20): Xaa is A or G
  MOD_RES (21)..(22)..(23)..(24): Xaa is A or G or is absent

SEQ ID NO: 83577 - protein, 39 aa, Artificial Sequence; identical to SEQ ID NO: 19807
  GFR-binding peptide
  MOD_RES (6)..(6): Xaa is C or S

SEQ ID NO: 83578 - protein, 37 aa, Artificial Sequence; identical to SEQ ID NO: 19091
  GFR-binding peptide
  MOD_RES (3)..(37): Xaa is C or S
  MOD_RES (17)..(18)..(19)..(20)..(21): Xaa is A or G
  MOD_RES (22)..(23)..(24)..(25): Xaa is A or G or is absent

SEQ ID NO: 83579 - protein, 34 aa, Artificial Sequence; identical to SEQ ID NO: 19809
  GFR-binding peptide
  MOD_RES (1)..(1): Xaa is C or S
  MOD_RES (15)..(16)..(17)..(18)..(19): Xaa is A or G
  MOD_RES (20)..(21)..(22)..(23): Xaa is A or G or is absent

SEQ ID NO: 83580 - protein, 38 aa, Artificial Sequence; identical to SEQ ID NO: 19092
  GFR-binding peptide
  MOD_RES (2)..(36)..(38): Xaa is C or S

SEQ ID NO: 83581 - protein, 35 aa, Artificial Sequence; identical to SEQ ID NO: 19810
  GFR-binding peptide
  MOD_RES (16)..(17)..(18)..(19)..(20): Xaa is A or G
  MOD_RES (21)..(22)..(23)..(24): Xaa is A or G or is absent

SEQ ID NO: 83582 - protein, 30 aa, Artificial Sequence; identical to SEQ ID NO: 53222
  GFR-binding peptide

SEQ ID NO: 83583 - protein, 39 aa, Artificial Sequence; identical to SEQ ID NO: 53223
  GFR-binding peptide
  MOD_RES (3)..(4)..(37)..(39): Xaa is C or S
  MOD_RES (18)..(19)..(20)..(21)..(22): Xaa is A or G
  MOD_RES (23)..(24)..(25)..(26): Xaa is A or G or is absent

SEQ ID NO: 83584 - protein, 34 aa, Artificial Sequence; identical to SEQ ID NO: 52015
  GFR-binding peptide
  MOD_RES (3)..(4): Xaa is C or S

SEQ ID NO: 83585 - protein, 44 aa, Artificial Sequence; identical to SEQ ID NO: 19812
  GFR-binding peptide
  MOD_RES (7)..(41)..(43): Xaa is C or S

SEQ ID NO: 83586 - protein, 39 aa, Artificial Sequence; identical to SEQ ID NO: 19094
  GFR-binding peptide
  MOD_RES (4)..(38): Xaa is C or S

SEQ ID NO: 83587 - protein, 36 aa, Artificial Sequence; identical to SEQ ID NO: 19813
  GFR-binding peptide
  MOD_RES (1)..(1): Xaa is C or S

SEQ ID NO: 83588 - protein, 39 aa, Artificial Sequence; identical to SEQ ID NO: 19814
  GFR-binding peptide
  MOD_RES (37)..(39): Xaa is C or S
  MOD_RES (16)..(17)..(18)..(19)..(20): Xaa is A or G
  MOD_RES (21)..(22)..(23)..(24): Xaa is A or G or is absent

SEQ ID NO: 83589 - protein, 43 aa, Artificial Sequence; identical to SEQ ID NO: 19820
  GFR-binding peptide
  MOD_RES (4)..(41)..(43): Xaa is C or S
  MOD_RES (20)..(21)..(22)..(23)..(24): Xaa is A or G
  MOD_RES (25)..(26)..(27)..(28): Xaa is A or G or is absent

SEQ ID NO: 83590 - protein, 38 aa, Artificial Sequence; identical to SEQ ID NO: 19095
  GFR-binding peptide
  MOD_RES (35)..(37): Xaa is C or S

SEQ ID NO: 83591 - protein, 41 aa, Artificial Sequence; identical to SEQ ID NO: 52025
  GFR-binding peptide
  MOD_RES (5)..(6)..(39)..(41): Xaa is C or S
  MOD_RES (20)..(21)..(22)..(23)..(24): Xaa is A or G
  MOD_RES (25)..(26)..(27)..(28): Xaa is A or G or is absent

SEQ ID NO: 83592 - protein, 34 aa, Artificial Sequence; identical to SEQ ID NO: 53236
  GFR-binding peptide
  MOD_RES (3)..(4): Xaa is C or S

SEQ ID NO: 83593 - protein, 44 aa, Artificial Sequence; identical to SEQ ID NO: 19823
  GFR-binding peptide
  MOD_RES (7)..(41)..(43): Xaa is C or S

SEQ ID NO: 83594 - protein, 38 aa, Artificial Sequence; identical to SEQ ID NO: 54455
  GFR-binding peptide
  MOD_RES (1)..(2)..(35)..(37): Xaa is C or S
  MOD_RES (16)..(17)..(18)..(19)..(20): Xaa is A or G
  MOD_RES (21)..(22)..(23)..(24): Xaa is A or G or is absent

SEQ ID NO: 83595 - protein, 39 aa, Artificial Sequence; identical to SEQ ID NO: 19824
  GFR-binding peptide
  MOD_RES (1)..(38): Xaa is C or S
  MOD_RES (17)..(18)..(19)..(20)..(21): Xaa is A or G
  MOD_RES (22)..(23)..(24)..(25): Xaa is A or G or is absent

SEQ ID NO: 83596 - protein, 32 aa, Artificial Sequence; identical to SEQ ID NO: 55641
  GFR-binding peptide
  MOD_RES (1)..(2): Xaa is C or S

SEQ ID NO: 83597 - protein, 39 aa, Artificial Sequence; identical to SEQ ID NO: 53239
  GFR-binding peptide
  MOD_RES (3)..(4)..(37)..(39): Xaa is C or S
  MOD_RES (18)..(19)..(20)..(21)..(22): Xaa is A or G
  MOD_RES (23)..(24)..(25)..(26): Xaa is A or G or is absent

SEQ ID NO: 83598 - protein, 39 aa, Artificial Sequence; identical to SEQ ID NO: 19098
  GFR-binding peptide
  MOD_RES (6)..(6): Xaa is C or S

SEQ ID NO: 83599 - protein, 34 aa, Artificial Sequence; identical to SEQ ID NO: 55643
  GFR-binding peptide
  MOD_RES (31)..(33): Xaa is C or S

SEQ ID NO: 83600 - protein, 41 aa, Artificial Sequence; identical to SEQ ID NO: 19099
  GFR-binding peptide
  MOD_RES (6)..(40): Xaa is C or S
  MOD_RES (20)..(21)..(22)..(23)..(24): Xaa is A or G
  MOD_RES (25)..(26)..(27)..(28): Xaa is A or G or is absent

SEQ ID NO: 83601 - protein, 36 aa, Artificial Sequence; identical to SEQ ID NO: 19826
  GFR-binding peptide
  MOD_RES (36)..(36): Xaa is C or S
  MOD_RES (15)..(16)..(17)..(18)..(19): Xaa is A or G
  MOD_RES (20)..(21)..(22)..(23): Xaa is A or G or is absent

SEQ ID NO: 83602 - protein, 37 aa, Artificial Sequence; identical to SEQ ID NO: 52039
  GFR-binding peptide
  MOD_RES (2)..(3)..(36): Xaa is C or S
  MOD_RES (17)..(18)..(19)..(20)..(21): Xaa is A or G
  MOD_RES (22)..(23)..(24)..(25): Xaa is A or G or is absent

SEQ ID NO: 83603 - protein, 38 aa, Artificial Sequence; identical to SEQ ID NO: 19827
  GFR-binding peptide
  MOD_RES (3)..(37): Xaa is C or S
  MOD_RES (17)..(18)..(19)..(20)..(21): Xaa is A or G
  MOD_RES (22)..(23)..(24)..(25): Xaa is A or G or is absent

SEQ ID NO: 83604 - protein, 43 aa, Artificial Sequence; identical to SEQ ID NO: 19828
  GFR-binding peptide
  MOD_RES (4)..(41)..(43): Xaa is C or S
  MOD_RES (20)..(21)..(22)..(23)..(24): Xaa is A or G
  MOD_RES (25)..(26)..(27)..(28): Xaa is A or G or is absent

SEQ ID NO: 83605 - protein, 38 aa, Artificial Sequence; identical to SEQ ID NO: 19829
  GFR-binding peptide
  MOD_RES (4)..(38): Xaa is C or S
  MOD_RES (18)..(19)..(20)..(21)..(22): Xaa is A or G
  MOD_RES (23)..(24)..(25)..(26): Xaa is A or G or is absent

SEQ ID NO: 83606 - protein, 34 aa, Artificial Sequence; identical to SEQ ID NO: 53252
  GFR-binding peptide
  MOD_RES (2)..(3)..(34): Xaa is C or S

SEQ ID NO: 83607 - protein, 33 aa, Artificial Sequence; identical to SEQ ID NO: 19105
  GFR-binding peptide

SEQ ID NO: 83608 - protein, 35 aa, Artificial Sequence; identical to SEQ ID NO: 52042
  GFR-binding peptide
  MOD_RES (1)..(2)..(33)..(35): Xaa is C or S

SEQ ID NO: 83609 - protein, 34 aa, Artificial Sequence; identical to SEQ ID NO: 19831
  GFR-binding peptide
  MOD_RES (2)..(2): Xaa is C or S

SEQ ID NO: 83610 - protein, 38 aa, Artificial Sequence; identical to SEQ ID NO: 19110
  GFR-binding peptide
  MOD_RES (5)..(5): Xaa is C or S
  MOD_RES (19)..(20)..(21)..(22)..(23): Xaa is A or G
  MOD_RES (24)..(25)..(26)..(27): Xaa is A or G or is absent

SEQ ID NO: 83611 - protein, 36 aa, Artificial Sequence; identical to SEQ ID NO: 53260
  GFR-binding peptide
  MOD_RES (4)..(5)..(36): Xaa is C or S

SEQ ID NO: 83612 - protein, 35 aa, Artificial Sequence; identical to SEQ ID NO: 52053
  GFR-binding peptide
  MOD_RES (1)..(2)..(33)..(35): Xaa is C or S

SEQ ID NO: 83613 - protein, 32 aa, Artificial Sequence; identical to SEQ ID NO: 19112
  GFR-binding peptide
  MOD_RES (14)..(15)..(16)..(17)..(18): Xaa is A or G
  MOD_RES (19)..(20)..(21)..(22): Xaa is A or G or is absent

SEQ ID NO: 83614 - protein, 40 aa, Artificial Sequence; identical to SEQ ID NO: 19113
  GFR-binding peptide
  MOD_RES (6)..(40): Xaa is C or S
  MOD_RES (20)..(21)..(22)..(23)..(24): Xaa is A or G
  MOD_RES (25)..(26)..(27)..(28): Xaa is A or G or is absent

SEQ ID NO: 83615 - protein, 36 aa, Artificial Sequence; identical to SEQ ID NO: 19834
  GFR-binding peptide
  MOD_RES (2)..(2): Xaa is C or S
  MOD_RES (18)..(19)..(20)..(21)..(22): Xaa is A or G
  MOD_RES (23)..(24)..(25)..(26): Xaa is A or G or is absent

SEQ ID NO: 83616 - protein, 42 aa, Artificial Sequence; identical to SEQ ID NO: 19836
  GFR-binding peptide
  MOD_RES (6)..(40)..(42): Xaa is C or S
  MOD_RES (20)..(21)..(22)..(23)..(24): Xaa is A or G
  MOD_RES (25)..(26)..(27)..(28): Xaa is A or G or is absent

SEQ ID NO: 83617 - protein, 36 aa, Artificial Sequence; identical to SEQ ID NO: 53264
  GFR-binding peptide
  MOD_RES (1)..(2)..(33)..(35): Xaa is C or S

SEQ ID NO: 83618 - protein, 35 aa, Artificial Sequence; identical to SEQ ID NO: 19115
  GFR-binding peptide
  MOD_RES (1)..(35): Xaa is C or S

SEQ ID NO: 83619 - protein, 38 aa, Artificial Sequence; identical to SEQ ID NO: 19837
  GFR-binding peptide
  MOD_RES (5)..(5): Xaa is C or S

SEQ ID NO: 83620 - protein, 40 aa, Artificial Sequence; identical to SEQ ID NO: 19116
  GFR-binding peptide
  MOD_RES (6)..(40): Xaa is C or S
  MOD_RES (20)..(21)..(22)..(23)..(24): Xaa is A or G
  MOD_RES (25)..(26)..(27)..(28): Xaa is A or G or is absent

SEQ ID NO: 83621 - protein, 38 aa, Artificial Sequence; identical to SEQ ID NO: 52057
  GFR-binding peptide
  MOD_RES (4)..(5)..(36)..(38): Xaa is C or S

SEQ ID NO: 83622 - protein, 40 aa, Artificial Sequence; identical to SEQ ID NO: 19838
  GFR-binding peptide
  MOD_RES (2)..(39): Xaa is C or S
  MOD_RES (18)..(19)..(20)..(21)..(22): Xaa is A or G
  MOD_RES (23)..(24)..(25)..(26): Xaa is A or G or is absent

SEQ ID NO: 83623 - protein, 35 aa, Artificial Sequence; identical to SEQ ID NO: 53265
  GFR-binding peptide
  MOD_RES (1)..(32)..(34): Xaa is C or S

SEQ ID NO: 83624 - protein, 43 aa, Artificial Sequence; identical to SEQ ID NO: 19118
  GFR-binding peptide
  MOD_RES (5)..(42): Xaa is C or S
  MOD_RES (21)..(22)..(23)..(24)..(25): Xaa is A or G
  MOD_RES (26)..(27)..(28)..(29): Xaa is A or G or is absent

SEQ ID NO: 83625 - protein, 42 aa, Artificial Sequence; identical to SEQ ID NO: 19839
  GFR-binding peptide
  MOD_RES (3)..(40)..(42): Xaa is C or S
  MOD_RES (19)..(20)..(21)..(22)..(23): Xaa is A or G
  MOD_RES (24)..(25)..(26)..(27): Xaa is A or G or is absent

SEQ ID NO: 83626 - protein, 37 aa, Artificial Sequence; identical to SEQ ID NO: 54487
  GFR-binding peptide
  MOD_RES (1)..(34)..(36): Xaa is C or S
  MOD_RES (15)..(16)..(17)..(18)..(19): Xaa is A or G
  MOD_RES (20)..(21)..(22)..(23): Xaa is A or G or is absent

SEQ ID NO: 83627 - protein, 41 aa, Artificial Sequence; identical to SEQ ID NO: 54488
  GFR-binding peptide
  MOD_RES (6)..(7)..(38)..(40): Xaa is C or S

SEQ ID NO: 83628 - protein, 44 aa, Artificial Sequence; identical to SEQ ID NO: 19840
  GFR-binding peptide
  MOD_RES (5)..(42)..(44): Xaa is C or S
  MOD_RES (21)..(22)..(23)..(24)..(25): Xaa is A or G
  MOD_RES (26)..(27)..(28)..(29): Xaa is A or G or is absent

SEQ ID NO: 83629 - protein, 34 aa, Artificial Sequence; identical to SEQ ID NO: 54490
  GFR-binding peptide
  MOD_RES (1)..(34): Xaa is C or S
  MOD_RES (15)..(16)..(17)..(18)..(19): Xaa is A or G
  MOD_RES (20)..(21)..(22)..(23): Xaa is A or G or is absent

SEQ ID NO: 83630 - protein, 34 aa, Artificial Sequence; identical to SEQ ID NO: 52061
  GFR-binding peptide
  MOD_RES (1)..(32)..(34): Xaa is C or S

SEQ ID NO: 83631 - protein, 33 aa, Artificial Sequence; identical to SEQ ID NO: 19121
  GFR-binding peptide
  MOD_RES (1)..(1): Xaa is C or S
  MOD_RES (15)..(16)..(17)..(18)..(19): Xaa is A or G
  MOD_RES (20)..(21)..(22)..(23): Xaa is A or G or is absent

SEQ ID NO: 83632 - protein, 34 aa, Artificial Sequence; identical to SEQ ID NO: 55670
  GFR-binding peptide
  MOD_RES (1)..(32)..(34): Xaa is C or S

SEQ ID NO: 83633 - protein, 33 aa, Artificial Sequence; identical to SEQ ID NO: 19123
  GFR-binding peptide
  MOD_RES (15)..(16)..(17)..(18)..(19): Xaa is A or G
  MOD_RES (20)..(21)..(22)..(23): Xaa is A or G or is absent

SEQ ID NO: 83634 - protein, 37 aa, Artificial Sequence; identical to SEQ ID NO: 19125
  GFR-binding peptide
  MOD_RES (5)..(5): Xaa is C or S

SEQ ID NO: 83635 - protein, 34 aa, Artificial Sequence; identical to SEQ ID NO: 55673
  GFR-binding peptide
  MOD_RES (1)..(34): Xaa is C or S
  MOD_RES (15)..(16)..(17)..(18)..(19): Xaa is A or G
  MOD_RES (20)..(21)..(22)..(23): Xaa is A or G or is absent

SEQ ID NO: 83636 - protein, 40 aa, Artificial Sequence; identical to SEQ ID NO: 19126
  GFR-binding peptide
  MOD_RES (3)..(37)..(39): Xaa is C or S
  MOD_RES (17)..(18)..(19)..(20)..(21): Xaa is A or G
  MOD_RES (22)..(23)..(24)..(25): Xaa is A or G or is absent

SEQ ID NO: 83637 - protein, 40 aa, Artificial Sequence; identical to SEQ ID NO: 54501
  GFR-binding peptide
  MOD_RES (6)..(7)..(40): Xaa is C or S
  MOD_RES (21)..(22)..(23)..(24)..(25): Xaa is A or G
  MOD_RES (26)..(27)..(28)..(29): Xaa is A or G or is absent

SEQ ID NO: 83638 - protein, 38 aa, Artificial Sequence; identical to SEQ ID NO: 19843
  GFR-binding peptide
  MOD_RES (6)..(6): Xaa is C or S
  MOD_RES (20)..(21)..(22)..(23)..(24): Xaa is A or G
  MOD_RES (25)..(26)..(27)..(28): Xaa is A or G or is absent

SEQ ID NO: 83639 - protein, 39 aa, Artificial Sequence; identical to SEQ ID NO: 19845
  GFR-binding peptide
  MOD_RES (2)..(36)..(38): Xaa is C or S
  MOD_RES (16)..(17)..(18)..(19)..(20): Xaa is A or G
  MOD_RES (21)..(22)..(23)..(24): Xaa is A or G or is absent

SEQ ID NO: 83640 - protein, 35 aa, Artificial Sequence; identical to SEQ ID NO: 19846
  GFR-binding peptide
  MOD_RES (3)..(3): Xaa is C or S
  MOD_RES (17)..(18)..(19)..(20)..(21): Xaa is A or G
  MOD_RES (22)..(23)..(24)..(25): Xaa is A or G or is absent

SEQ ID NO: 83641 - protein, 39 aa, Artificial Sequence; identical to SEQ ID NO: 52078
  GFR-binding peptide
  MOD_RES (6)..(7): Xaa is C or S
  MOD_RES (21)..(22)..(23)..(24)..(25): Xaa is A or G
  MOD_RES (26)..(27)..(28)..(29): Xaa is A or G or is absent

SEQ ID NO: 83642 - protein, 34 aa, Artificial Sequence; identical to SEQ ID NO: 19848
  GFR-binding peptide
  MOD_RES (1)..(1): Xaa is C or S

SEQ ID NO: 83643 - protein, 39 aa, Artificial Sequence; identical to SEQ ID NO: 19849
  GFR-binding peptide
  MOD_RES (3)..(3): Xaa is C or S

SEQ ID NO: 83644 - protein, 42 aa, Artificial Sequence; identical to SEQ ID NO: 19132
  GFR-binding peptide
  MOD_RES (4)..(41): Xaa is C or S
  MOD_RES (20)..(21)..(22)..(23)..(24): Xaa is A or G
  MOD_RES (25)..(26)..(27)..(28): Xaa is A or G or is absent

SEQ ID NO: 83645 - protein, 36 aa, Artificial Sequence; identical to SEQ ID NO: 19134
  GFR-binding peptide
  MOD_RES (4)..(4): Xaa is C or S

SEQ ID NO: 83646 - protein, 42 aa, Artificial Sequence; identical to SEQ ID NO: 19853
  GFR-binding peptide
  MOD_RES (3)..(40)..(42): Xaa is C or S
  MOD_RES (19)..(20)..(21)..(22)..(23): Xaa is A or G
  MOD_RES (24)..(25)..(26)..(27): Xaa is A or G or is absent

SEQ ID NO: 83647 - protein, 37 aa, Artificial Sequence; identical to SEQ ID NO: 19854
  GFR-binding peptide
  MOD_RES (37)..(37): Xaa is C or S

SEQ ID NO: 83648 - protein, 36 aa, Artificial Sequence; identical to SEQ ID NO: 19855
  GFR-binding peptide
  MOD_RES (1)..(35): Xaa is C or S

SEQ ID NO: 83649 - protein, 39 aa, Artificial Sequence; identical to SEQ ID NO: 19856
  GFR-binding peptide
  MOD_RES (1)..(38): Xaa is C or S
  MOD_RES (17)..(18)..(19)..(20)..(21): Xaa is A or G
  MOD_RES (22)..(23)..(24)..(25): Xaa is A or G or is absent

SEQ ID NO: 83650 - protein, 40 aa, Artificial Sequence; identical to SEQ ID NO: 52094
  GFR-binding peptide
  MOD_RES (5)..(6)..(37)..(39): Xaa is C or S

SEQ ID NO: 83651 - protein, 35 aa, Artificial Sequence; identical to SEQ ID NO: 19857
  GFR-binding peptide
  MOD_RES (2)..(2): Xaa is C or S
  MOD_RES (16)..(17)..(18)..(19)..(20): Xaa is A or G
  MOD_RES (21)..(22)..(23)..(24): Xaa is A or G or is absent

SEQ ID NO: 83652 - protein, 40 aa, Artificial Sequence; identical to SEQ ID NO: 19860
  GFR-binding peptide
  MOD_RES (3)..(40): Xaa is C or S

SEQ ID NO: 83653 - protein, 37 aa, Artificial Sequence; identical to SEQ ID NO: 19136
  GFR-binding peptide
  MOD_RES (1)..(35)..(37): Xaa is C or S

SEQ ID NO: 83654 - protein, 39 aa, Artificial Sequence; identical to SEQ ID NO: 54517
  GFR-binding peptide
  MOD_RES (2)..(3)..(36)..(38): Xaa is C or S
  MOD_RES (17)..(18)..(19)..(20)..(21): Xaa is A or G
  MOD_RES (22)..(23)..(24)..(25): Xaa is A or G or is absent

SEQ ID NO: 83655 - protein, 33 aa, Artificial Sequence; identical to SEQ ID NO: 55685
  GFR-binding peptide
  MOD_RES (33)..(33): Xaa is C or S
  MOD_RES (14)..(15)..(16)..(17)..(18): Xaa is A or G
  MOD_RES (19)..(20)..(21)..(22): Xaa is A or G or is absent

SEQ ID NO: 83656 - protein, 35 aa, Artificial Sequence; identical to SEQ ID NO: 54519
  GFR-binding peptide
  MOD_RES (1)..(32)..(34): Xaa is C or S

SEQ ID NO: 83657 - protein, 38 aa, Artificial Sequence; identical to SEQ ID NO: 54520
  GFR-binding peptide
  MOD_RES (5)..(6): Xaa is C or S
  MOD_RES (20)..(21)..(22)..(23)..(24): Xaa is A or G
  MOD_RES (25)..(26)..(27)..(28): Xaa is A or G or is absent

SEQ ID NO: 83658 - protein, 36 aa, Artificial Sequence; identical to SEQ ID NO: 19861
  GFR-binding peptide
  MOD_RES (2)..(2): Xaa is C or S

SEQ ID NO: 83659 - protein, 36 aa, Artificial Sequence; identical to SEQ ID NO: 54525
  GFR-binding peptide
  MOD_RES (1)..(34)..(36): Xaa is C or S
  MOD_RES (15)..(16)..(17)..(18)..(19): Xaa is A or G
  MOD_RES (20)..(21)..(22)..(23): Xaa is A or G or is absent

SEQ ID NO: 83660 - protein, 33 aa, Artificial Sequence; identical to SEQ ID NO: 55691
  GFR-binding peptide
  MOD_RES (31)..(33): Xaa is C or S

SEQ ID NO: 83661 - protein, 37 aa, Artificial Sequence; identical to SEQ ID NO: 53303
  GFR-binding peptide
  MOD_RES (1)..(34)..(36): Xaa is C or S
  MOD_RES (15)..(16)..(17)..(18)..(19): Xaa is A or G
  MOD_RES (20)..(21)..(22)..(23): Xaa is A or G or is absent

SEQ ID NO: 83662 - protein, 43 aa, Artificial Sequence; identical to SEQ ID NO: 19865
  GFR-binding peptide
  MOD_RES (7)..(41)..(43): Xaa is C or S

SEQ ID NO: 83663 - protein, 36 aa, Artificial Sequence; identical to SEQ ID NO: 19141
  GFR-binding peptide
  MOD_RES (4)..(4): Xaa is C or S

SEQ ID NO: 83664 - protein, 44 aa, Artificial Sequence; identical to SEQ ID NO: 19868
  GFR-binding peptide
  MOD_RES (7)..(41)..(43): Xaa is C or S
  MOD_RES (21)..(22)..(23)..(24)..(25): Xaa is A or G
  MOD_RES (26)..(27)..(28)..(29): Xaa is A or G or is absent

SEQ ID NO: 83665 - protein, 40 aa, Artificial Sequence; identical to SEQ ID NO: 53304
  GFR-binding peptide
  MOD_RES (6)..(7)..(38)..(40): Xaa is C or S

SEQ ID NO: 83666 - protein, 37 aa, Artificial Sequence; identical to SEQ ID NO: 53305
  GFR-binding peptide
  MOD_RES (1)..(2)..(35)..(37): Xaa is C or S
  MOD_RES (16)..(17)..(18)..(19)..(20): Xaa is A or G
  MOD_RES (21)..(22)..(23)..(24): Xaa is A or G or is absent

SEQ ID NO: 83667 - protein, 36 aa, Artificial Sequence; identical to SEQ ID NO: 52108
  GFR-binding peptide
  MOD_RES (4)..(5)..(36): Xaa is C or S

SEQ ID NO: 83668 - protein, 34 aa, Artificial Sequence; identical to SEQ ID NO: 54530
  GFR-binding peptide
  MOD_RES (31)..(33): Xaa is C or S

SEQ ID NO: 83669 - protein, 35 aa, Artificial Sequence; identical to SEQ ID NO: 19143
  GFR-binding peptide
  MOD_RES (34)..(34): Xaa is C or S
  MOD_RES (14)..(15)..(16)..(17)..(18): Xaa is A or G
  MOD_RES (19)..(20)..(21)..(22): Xaa is A or G or is absent

SEQ ID NO: 83670 - protein, 33 aa, Artificial Sequence; identical to SEQ ID NO: 53310
  GFR-binding peptide
  MOD_RES (1)..(1): Xaa is C or S
  MOD_RES (15)..(16)..(17)..(18)..(19): Xaa is A or G
  MOD_RES (20)..(21)..(22)..(23): Xaa is A or G or is absent

SEQ ID NO: 83671 - protein, 31 aa, Artificial Sequence; identical to SEQ ID NO: 54534
  GFR-binding peptide
  MOD_RES (31)..(31): Xaa is C or S

SEQ ID NO: 83672 - protein, 34 aa, Artificial Sequence; identical to SEQ ID NO: 19871
  GFR-binding peptide
  MOD_RES (14)..(15)..(16)..(17)..(18): Xaa is A or G
  MOD_RES (19)..(20)..(21)..(22): Xaa is A or G or is absent

SEQ ID NO: 83673 - protein, 33 aa, Artificial Sequence; identical to SEQ ID NO: 19872
  GFR-binding peptide

SEQ ID NO: 83674 - protein, 43 aa, Artificial Sequence; identical to SEQ ID NO: 19148
  GFR-binding peptide
  MOD_RES (5)..(42): Xaa is C or S

SEQ ID NO: 83675 - protein, 37 aa, Artificial Sequence; identical to SEQ ID NO: 19149
  GFR-binding peptide
  MOD_RES (4)..(4): Xaa is C or S

SEQ ID NO: 83676 - protein, 31 aa, Artificial Sequence; identical to SEQ ID NO: 53320
  GFR-binding peptide
  MOD_RES (1)..(1): Xaa is C or S

SEQ ID NO: 83677 - protein, 37 aa, Artificial Sequence; identical to SEQ ID NO: 19150
  GFR-binding peptide
  MOD_RES (1)..(35)..(37): Xaa is C or S

SEQ ID NO: 83678 - protein, 40 aa, Artificial Sequence; identical to SEQ ID NO: 53321
  GFR-binding peptide
  MOD_RES (3)..(4)..(37)..(39): Xaa is C or S
  MOD_RES (18)..(19)..(20)..(21)..(22): Xaa is A or G
  MOD_RES (23)..(24)..(25)..(26): Xaa is A or G or is absent

SEQ ID NO: 83679 - protein, 43 aa, Artificial Sequence; identical to SEQ ID NO: 19876
  GFR-binding peptide
  MOD_RES (4)..(41)..(43): Xaa is C or S
  MOD_RES (20)..(21)..(22)..(23)..(24): Xaa is A or G
  MOD_RES (25)..(26)..(27)..(28): Xaa is A or G or is absent

SEQ ID NO: 83680 - protein, 41 aa, Artificial Sequence; identical to SEQ ID NO: 19877
  GFR-binding peptide
  MOD_RES (5)..(39)..(41): Xaa is C or S
  MOD_RES (19)..(20)..(21)..(22)..(23): Xaa is A or G
  MOD_RES (24)..(25)..(26)..(27): Xaa is A or G or is absent

SEQ ID NO: 83681 - protein, 38 aa, Artificial Sequence; identical to SEQ ID NO: 53322
  GFR-binding peptide
  MOD_RES (3)..(4)..(37): Xaa is C or S
  MOD_RES (18)..(19)..(20)..(21)..(22): Xaa is A or G
  MOD_RES (23)..(24)..(25)..(26): Xaa is A or G or is absent

SEQ ID NO: 83682 - protein, 35 aa, Artificial Sequence; identical to SEQ ID NO: 19155
  GFR-binding peptide
  MOD_RES (1)..(35): Xaa is C or S
  MOD_RES (15)..(16)..(17)..(18)..(19): Xaa is A or G
  MOD_RES (20)..(21)..(22)..(23): Xaa is A or G or is absent

SEQ ID NO: 83683 - protein, 44 aa, Artificial Sequence; identical to SEQ ID NO: 19156
  GFR-binding peptide
  MOD_RES (7)..(41)..(43): Xaa is C or S

SEQ ID NO: 83684 - protein, 33 aa, Artificial Sequence; identical to SEQ ID NO: 54550
  GFR-binding peptide
  MOD_RES (31)..(33): Xaa is C or S

SEQ ID NO: 83685 - protein, 39 aa, Artificial Sequence; identical to SEQ ID NO: 19158
  GFR-binding peptide
  MOD_RES (2)..(36)..(38): Xaa is C or S
  MOD_RES (16)..(17)..(18)..(19)..(20): Xaa is A or G
  MOD_RES (21)..(22)..(23)..(24): Xaa is A or G or is absent

SEQ ID NO: 83686 - protein, 36 aa, Artificial Sequence; identical to SEQ ID NO: 19159
  GFR-binding peptide
  MOD_RES (35)..(35): Xaa is C or S
  MOD_RES (14)..(15)..(16)..(17)..(18): Xaa is A or G
  MOD_RES (19)..(20)..(21)..(22): Xaa is A or G or is absent

SEQ ID NO: 83687 - protein, 40 aa, Artificial Sequence; identical to SEQ ID NO: 19880
  GFR-binding peptide
  MOD_RES (7)..(7): Xaa is C or S

SEQ ID NO: 83688 - protein, 35 aa, Artificial Sequence; identical to SEQ ID NO: 53329
  GFR-binding peptide
  MOD_RES (33)..(35): Xaa is C or S
  MOD_RES (14)..(15)..(16)..(17)..(18): Xaa is A or G
  MOD_RES (19)..(20)..(21)..(22): Xaa is A or G or is absent

SEQ ID NO: 83689 - protein, 35 aa, Artificial Sequence; identical to SEQ ID NO: 19162
  GFR-binding peptide
  MOD_RES (1)..(35): Xaa is C or S

SEQ ID NO: 83690 - protein, 43 aa, Artificial Sequence; identical to SEQ ID NO: 52134
  GFR-binding peptide
  MOD_RES (6)..(7)..(40)..(42): Xaa is C or S
  MOD_RES (21)..(22)..(23)..(24)..(25): Xaa is A or G
  MOD_RES (26)..(27)..(28)..(29): Xaa is A or G or is absent

SEQ ID NO: 83691 - protein, 37 aa, Artificial Sequence; identical to SEQ ID NO: 19163
  GFR-binding peptide
  MOD_RES (37)..(37): Xaa is C or S

SEQ ID NO: 83692 - protein, 33 aa, Artificial Sequence; identical to SEQ ID NO: 52139
  GFR-binding peptide
  MOD_RES (31)..(33): Xaa is C or S

SEQ ID NO: 83693 - protein, 37 aa, Artificial Sequence; identical to SEQ ID NO: 19881
  GFR-binding peptide
  MOD_RES (36)..(36): Xaa is C or S
  MOD_RES (15)..(16)..(17)..(18)..(19): Xaa is A or G
  MOD_RES (20)..(21)..(22)..(23): Xaa is A or G or is absent

SEQ ID NO: 83694 - protein, 36 aa, Artificial Sequence; identical to SEQ ID NO: 19882
  GFR-binding peptide

SEQ ID NO: 83695 - protein, 40 aa, Artificial Sequence; identical to SEQ ID NO: 19165
  GFR-binding peptide
  MOD_RES (3)..(40): Xaa is C or S
  MOD_RES (19)..(20)..(21)..(22)..(23): Xaa is A or G
  MOD_RES (24)..(25)..(26)..(27): Xaa is A or G or is absent

SEQ ID NO: 83696 - protein, 35 aa, Artificial Sequence; identical to SEQ ID NO: 19886
  GFR-binding peptide
  MOD_RES (3)..(3): Xaa is C or S
  MOD_RES (17)..(18)..(19)..(20)..(21): Xaa is A or G
  MOD_RES (22)..(23)..(24)..(25): Xaa is A or G or is absent

SEQ ID NO: 83697 - protein, 34 aa, Artificial Sequence; identical to SEQ ID NO: 19888
  GFR-binding peptide
  MOD_RES (14)..(15)..(16)..(17)..(18): Xaa is A or G
  MOD_RES (19)..(20)..(21)..(22): Xaa is A or G or is absent

SEQ ID NO: 83698 - protein, 39 aa, Artificial Sequence; identical to SEQ ID NO: 53338
  GFR-binding peptide
  MOD_RES (4)..(5)..(36)..(38): Xaa is C or S

SEQ ID NO: 83699 - protein, 40 aa, Artificial Sequence; identical to SEQ ID NO: 19166
  GFR-binding peptide
  MOD_RES (1)..(38)..(40): Xaa is C or S

SEQ ID NO: 83700 - protein, 38 aa, Artificial Sequence; identical to SEQ ID NO: 19889
  GFR-binding peptide
  MOD_RES (3)..(3): Xaa is C or S
  MOD_RES (19)..(20)..(21)..(22)..(23): Xaa is A or G
  MOD_RES (24)..(25)..(26)..(27): Xaa is A or G or is absent

SEQ ID NO: 83701 - protein, 38 aa, Artificial Sequence; identical to SEQ ID NO: 55724
  GFR-binding peptide
  MOD_RES (1)..(2)..(35)..(37): Xaa is C or S
  MOD_RES (16)..(17)..(18)..(19)..(20): Xaa is A or G
  MOD_RES (21)..(22)..(23)..(24): Xaa is A or G or is absent

SEQ ID NO: 83702 - protein, 31 aa, Artificial Sequence; identical to SEQ ID NO: 52145
  GFR-binding peptide
  MOD_RES (31)..(31): Xaa is C or S

SEQ ID NO: 83703 - protein, 39 aa, Artificial Sequence; identical to SEQ ID NO: 53344
  GFR-binding peptide
  MOD_RES (5)..(6)..(39): Xaa is C or S
  MOD_RES (20)..(21)..(22)..(23)..(24): Xaa is A or G
  MOD_RES (25)..(26)..(27)..(28): Xaa is A or G or is absent

SEQ ID NO: 83704 - protein, 36 aa, Artificial Sequence; identical to SEQ ID NO: 19168
  GFR-binding peptide
  MOD_RES (3)..(3): Xaa is C or S
  MOD_RES (17)..(18)..(19)..(20)..(21): Xaa is A or G
  MOD_RES (22)..(23)..(24)..(25): Xaa is A or G or is absent

SEQ ID NO: 83705 - protein, 33 aa, Artificial Sequence; identical to SEQ ID NO: 19169
  GFR-binding peptide
  MOD_RES (1)..(1): Xaa is C or S
  MOD_RES (15)..(16)..(17)..(18)..(19): Xaa is A or G
  MOD_RES (20)..(21)..(22)..(23): Xaa is A or G or is absent

SEQ ID NO: 83706 - protein, 37 aa, Artificial Sequence; identical to SEQ ID NO: 52147
  GFR-binding peptide
  MOD_RES (5)..(6)..(37): Xaa is C or S

SEQ ID NO: 83707 - protein, 41 aa, Artificial Sequence; identical to SEQ ID NO: 52149
  GFR-binding peptide
  MOD_RES (6)..(7)..(38)..(40): Xaa is C or S

SEQ ID NO: 83708 - protein, 40 aa, Artificial Sequence; identical to SEQ ID NO: 55725
  GFR-binding peptide
  MOD_RES (6)..(7)..(40): Xaa is C or S
  MOD_RES (21)..(22)..(23)..(24)..(25): Xaa is A or G
  MOD_RES (26)..(27)..(28)..(29): Xaa is A or G or is absent

SEQ ID NO: 83709 - protein, 45 aa, Artificial Sequence; identical to SEQ ID NO: 19170
  GFR-binding peptide
  MOD_RES (5)..(42)..(44): Xaa is C or S
  MOD_RES (21)..(22)..(23)..(24)..(25): Xaa is A or G
  MOD_RES (26)..(27)..(28)..(29): Xaa is A or G or is absent

SEQ ID NO: 83710 - protein, 38 aa, Artificial Sequence; identical to SEQ ID NO: 19890
  GFR-binding peptide
  MOD_RES (3)..(3): Xaa is C or S

SEQ ID NO: 83711 - protein, 40 aa, Artificial Sequence; identical to SEQ ID NO: 19891
  GFR-binding peptide
  MOD_RES (37)..(39): Xaa is C or S
  MOD_RES (16)..(17)..(18)..(19)..(20): Xaa is A or G
  MOD_RES (21)..(22)..(23)..(24): Xaa is A or G or is absent

SEQ ID NO: 83712 - protein, 44 aa, Artificial Sequence; identical to SEQ ID NO: 19892
  GFR-binding peptide
  MOD_RES (5)..(42)..(44): Xaa is C or S
  MOD_RES (21)..(22)..(23)..(24)..(25): Xaa is A or G
  MOD_RES (26)..(27)..(28)..(29): Xaa is A or G or is absent

SEQ ID NO: 83713 - protein, 34 aa, Artificial Sequence; identical to SEQ ID NO: 55733
  GFR-binding peptide
  MOD_RES (1)..(2): Xaa is C or S
  MOD_RES (16)..(17)..(18)..(19)..(20): Xaa is A or G
  MOD_RES (21)..(22)..(23)..(24): Xaa is A or G or is absent

SEQ ID NO: 83714 - protein, 38 aa, Artificial Sequence; identical to SEQ ID NO: 19173
  GFR-binding peptide
  MOD_RES (37)..(37): Xaa is C or S
  MOD_RES (16)..(17)..(18)..(19)..(20): Xaa is A or G
  MOD_RES (21)..(22)..(23)..(24): Xaa is A or G or is absent

SEQ ID NO: 83715 - protein, 40 aa, Artificial Sequence; identical to SEQ ID NO: 19895
  GFR-binding peptide
  MOD_RES (2)..(39): Xaa is C or S

SEQ ID NO: 83716 - protein, 42 aa, Artificial Sequence; identical to SEQ ID NO: 54572
  GFR-binding peptide
  MOD_RES (5)..(6)..(39)..(41): Xaa is C or S
  MOD_RES (20)..(21)..(22)..(23)..(24): Xaa is A or G
  MOD_RES (25)..(26)..(27)..(28): Xaa is A or G or is absent

SEQ ID NO: 83717 - protein, 37 aa, Artificial Sequence; identical to SEQ ID NO: 53355
  GFR-binding peptide
  MOD_RES (2)..(3)..(34)..(36): Xaa is C or S

SEQ ID NO: 83718 - protein, 36 aa, Artificial Sequence; identical to SEQ ID NO: 53359
  GFR-binding peptide
  MOD_RES (2)..(3)..(36): Xaa is C or S
  MOD_RES (17)..(18)..(19)..(20)..(21): Xaa is A or G
  MOD_RES (22)..(23)..(24)..(25): Xaa is A or G or is absent

SEQ ID NO: 83719 - protein, 35 aa, Artificial Sequence; identical to SEQ ID NO: 52161
  GFR-binding peptide
  MOD_RES (1)..(34): Xaa is C or S
  MOD_RES (15)..(16)..(17)..(18)..(19): Xaa is A or G
  MOD_RES (20)..(21)..(22)..(23): Xaa is A or G or is absent

SEQ ID NO: 83720 - protein, 37 aa, Artificial Sequence; identical to SEQ ID NO: 19174
  GFR-binding peptide
  MOD_RES (2)..(2): Xaa is C or S
  MOD_RES (18)..(19)..(20)..(21)..(22): Xaa is A or G
  MOD_RES (23)..(24)..(25)..(26): Xaa is A or G or is absent

SEQ ID NO: 83721 - protein, 38 aa, Artificial Sequence; identical to SEQ ID NO: 19176
  GFR-binding peptide
  MOD_RES (2)..(2): Xaa is C or S
  MOD_RES (18)..(19)..(20)..(21)..(22): Xaa is A or G
  MOD_RES (23)..(24)..(25)..(26): Xaa is A or G or is absent

SEQ ID NO: 83722 - protein, 38 aa, Artificial Sequence; identical to SEQ ID NO: 19177
  GFR-binding peptide
  MOD_RES (4)..(4): Xaa is C or S

SEQ ID NO: 83723 - protein, 37 aa, Artificial Sequence; identical to SEQ ID NO: 19898
  GFR-binding peptide
  MOD_RES (1)..(35)..(37): Xaa is C or S
  MOD_RES (15)..(16)..(17)..(18)..(19): Xaa is A or G
  MOD_RES (20)..(21)..(22)..(23): Xaa is A or G or is absent

SEQ ID NO: 83724 - protein, 43 aa, Artificial Sequence; identical to SEQ ID NO: 19899
  GFR-binding peptide
  MOD_RES (3)..(40)..(42): Xaa is C or S

SEQ ID NO: 83725 - protein, 40 aa, Artificial Sequence; identical to SEQ ID NO: 19180
  GFR-binding peptide
  MOD_RES (3)..(37)..(39): Xaa is C or S

SEQ ID NO: 83726 - protein, 38 aa, Artificial Sequence; identical to SEQ ID NO: 52174
  GFR-binding peptide
  MOD_RES (4)..(5)..(38): Xaa is C or S
  MOD_RES (19)..(20)..(21)..(22)..(23): Xaa is A or G
  MOD_RES (24)..(25)..(26)..(27): Xaa is A or G or is absent

SEQ ID NO: 83727 - protein, 41 aa, Artificial Sequence; identical to SEQ ID NO: 19183
  GFR-binding peptide
  MOD_RES (4)..(41): Xaa is C or S
  MOD_RES (20)..(21)..(22)..(23)..(24): Xaa is A or G
  MOD_RES (25)..(26)..(27)..(28): Xaa is A or G or is absent

SEQ ID NO: 83728 - protein, 35 aa, Artificial Sequence; identical to SEQ ID NO: 55747
  GFR-binding peptide
  MOD_RES (3)..(4)..(35): Xaa is C or S

SEQ ID NO: 83729 - protein, 37 aa, Artificial Sequence; identical to SEQ ID NO: 55748
  GFR-binding peptide
  MOD_RES (3)..(4)..(35)..(37): Xaa is C or S

SEQ ID NO: 83730 - protein, 38 aa, Artificial Sequence; identical to SEQ ID NO: 19900
  GFR-binding peptide
  MOD_RES (6)..(6): Xaa is C or S
  MOD_RES (20)..(21)..(22)..(23)..(24): Xaa is A or G
  MOD_RES (25)..(26)..(27)..(28): Xaa is A or G or is absent

SEQ ID NO: 83731 - protein, 37 aa, Artificial Sequence; identical to SEQ ID NO: 53366
  GFR-binding peptide
  MOD_RES (1)..(2)..(35)..(37): Xaa is C or S
  MOD_RES (16)..(17)..(18)..(19)..(20): Xaa is A or G
  MOD_RES (21)..(22)..(23)..(24): Xaa is A or G or is absent

SEQ ID NO: 83732 - protein, 33 aa, Artificial Sequence; identical to SEQ ID NO: 52177
  GFR-binding peptide
  MOD_RES (1)..(2)..(33): Xaa is C or S

SEQ ID NO: 83733 - protein, 41 aa, Artificial Sequence; identical to SEQ ID NO: 19903
  GFR-binding peptide
  MOD_RES (5)..(39)..(41): Xaa is C or S
  MOD_RES (19)..(20)..(21)..(22)..(23): Xaa is A or G
  MOD_RES (24)..(25)..(26)..(27): Xaa is A or G or is absent

SEQ ID NO: 83734 - protein, 41 aa, Artificial Sequence; identical to SEQ ID NO: 19904
  GFR-binding peptide
  MOD_RES (4)..(38)..(40): Xaa is C or S

SEQ ID NO: 83735 - protein, 36 aa, Artificial Sequence; identical to SEQ ID NO: 19184
  GFR-binding peptide
  MOD_RES (36)..(36): Xaa is C or S

SEQ ID NO: 83736 - protein, 32 aa, Artificial Sequence; identical to SEQ ID NO: 52179
  GFR-binding peptide
  MOD_RES (31)..(31): Xaa is C or S

SEQ ID NO: 83737 - protein, 40 aa, Artificial Sequence; identical to SEQ ID NO: 19185
  GFR-binding peptide
  MOD_RES (5)..(39): Xaa is C or S
  MOD_RES (19)..(20)..(21)..(22)..(23): Xaa is A or G
  MOD_RES (24)..(25)..(26)..(27): Xaa is A or G or is absent

SEQ ID NO: 83738 - protein, 39 aa, Artificial Sequence; identical to SEQ ID NO: 19186
  GFR-binding peptide
  MOD_RES (36)..(38): Xaa is C or S

SEQ ID NO: 83739 - protein, 38 aa, Artificial Sequence; identical to SEQ ID NO: 19905
  GFR-binding peptide
  MOD_RES (2)..(36)..(38): Xaa is C or S
  MOD_RES (16)..(17)..(18)..(19)..(20): Xaa is A or G
  MOD_RES (21)..(22)..(23)..(24): Xaa is A or G or is absent

SEQ ID NO: 83740 - protein, 37 aa, Artificial Sequence; identical to SEQ ID NO: 19907
  GFR-binding peptide
  MOD_RES (36)..(36): Xaa is C or S
  MOD_RES (15)..(16)..(17)..(18)..(19): Xaa is A or G
  MOD_RES (20)..(21)..(22)..(23): Xaa is A or G or is absent

SEQ ID NO: 83741 - protein, 34 aa, Artificial Sequence; identical to SEQ ID NO: 55760
  GFR-binding peptide
  MOD_RES (1)..(2): Xaa is C or S
  MOD_RES (16)..(17)..(18)..(19)..(20): Xaa is A or G
  MOD_RES (21)..(22)..(23)..(24): Xaa is A or G or is absent

SEQ ID NO: 83742 - protein, 36 aa, Artificial Sequence; identical to SEQ ID NO: 19909
  GFR-binding peptide
  MOD_RES (3)..(3): Xaa is C or S

SEQ ID NO: 83743 - protein, 39 aa, Artificial Sequence; identical to SEQ ID NO: 19910
  GFR-binding peptide
  MOD_RES (4)..(38): Xaa is C or S

SEQ ID NO: 83744 - protein, 42 aa, Artificial Sequence; identical to SEQ ID NO: 19188
  GFR-binding peptide
  MOD_RES (5)..(39)..(41): Xaa is C or S

SEQ ID NO: 83745 - protein, 39 aa, Artificial Sequence; identical to SEQ ID NO: 19189
  GFR-binding peptide
  MOD_RES (2)..(39): Xaa is C or S

SEQ ID NO: 83746 - protein, 35 aa, Artificial Sequence; identical to SEQ ID NO: 19912
  GFR-binding peptide
  MOD_RES (3)..(3): Xaa is C or S
  MOD_RES (17)..(18)..(19)..(20)..(21): Xaa is A or G
  MOD_RES (22)..(23)..(24)..(25): Xaa is A or G or is absent

SEQ ID NO: 83747 - protein, 37 aa, Artificial Sequence; identical to SEQ ID NO: 19913
  GFR-binding peptide
  MOD_RES (3)..(3): Xaa is C or S

SEQ ID NO: 83748 - protein, 33 aa, Artificial Sequence; identical to SEQ ID NO: 54598
  GFR-binding peptide
  MOD_RES (33)..(33): Xaa is C or S
  MOD_RES (14)..(15)..(16)..(17)..(18): Xaa is A or G
  MOD_RES (19)..(20)..(21)..(22): Xaa is A or G or is absent

SEQ ID NO: 83749 - protein, 37 aa, Artificial Sequence; identical to SEQ ID NO: 52184
  GFR-binding peptide
  MOD_RES (3)..(4)..(35)..(37): Xaa is C or S

SEQ ID NO: 83750 - protein, 40 aa, Artificial Sequence; identical to SEQ ID NO: 19916
  GFR-binding peptide
  MOD_RES (3)..(37)..(39): Xaa is C or S

SEQ ID NO: 83751 - protein, 43 aa, Artificial Sequence; identical to SEQ ID NO: 19194
  GFR-binding peptide
  MOD_RES (7)..(41)..(43): Xaa is C or S

SEQ ID NO: 83752 - protein, 33 aa, Artificial Sequence; identical to SEQ ID NO: 55777
  GFR-binding peptide
  MOD_RES (2)..(3): Xaa is C or S

SEQ ID NO: 83753 - protein, 40 aa, Artificial Sequence; identical to SEQ ID NO: 19918
  GFR-binding peptide
  MOD_RES (1)..(38)..(40): Xaa is C or S
  MOD_RES (17)..(18)..(19)..(20)..(21): Xaa is A or G
  MOD_RES (22)..(23)..(24)..(25): Xaa is A or G or is absent

SEQ ID NO: 83754 - protein, 40 aa, Artificial Sequence; identical to SEQ ID NO: 19919
  GFR-binding peptide
  MOD_RES (4)..(4): Xaa is C or S
  MOD_RES (20)..(21)..(22)..(23)..(24): Xaa is A or G
  MOD_RES (25)..(26)..(27)..(28): Xaa is A or G or is absent

SEQ ID NO: 83755 - protein, 38 aa, Artificial Sequence; identical to SEQ ID NO: 19920
  GFR-binding peptide
  MOD_RES (3)..(37): Xaa is C or S
  MOD_RES (17)..(18)..(19)..(20)..(21): Xaa is A or G
  MOD_RES (22)..(23)..(24)..(25): Xaa is A or G or is absent

SEQ ID NO: 83756 - protein, 38 aa, Artificial Sequence; identical to SEQ ID NO: 19921
  GFR-binding peptide
  MOD_RES (1)..(38): Xaa is C or S
  MOD_RES (17)..(18)..(19)..(20)..(21): Xaa is A or G
  MOD_RES (22)..(23)..(24)..(25): Xaa is A or G or is absent

SEQ ID NO: 83757 - protein, 36 aa, Artificial Sequence; identical to SEQ ID NO: 19922
  GFR-binding peptide
  MOD_RES (2)..(36): Xaa is C or S

SEQ ID NO: 83758 - protein, 33 aa, Artificial Sequence; identical to SEQ ID NO: 55786
  GFR-binding peptide
  MOD_RES (1)..(32): Xaa is C or S

SEQ ID NO: 83759 - protein, 35 aa, Artificial Sequence; identical to SEQ ID NO: 19923
  GFR-binding peptide
  MOD_RES (15)..(16)..(17)..(18)..(19): Xaa is A or G
  MOD_RES (20)..(21)..(22)..(23): Xaa is A or G or is absent

SEQ ID NO: 83760 - protein, 37 aa, Artificial Sequence; identical to SEQ ID NO: 19924
  GFR-binding peptide
  MOD_RES (1)..(1): Xaa is C or S
  MOD_RES (17)..(18)..(19)..(20)..(21): Xaa is A or G
  MOD_RES (22)..(23)..(24)..(25): Xaa is A or G or is absent

SEQ ID NO: 83761 - protein, 40 aa, Artificial Sequence; identical to SEQ ID NO: 19925
  GFR-binding peptide
  MOD_RES (1)..(38)..(40): Xaa is C or S

SEQ ID NO: 83762 - protein, 37 aa, Artificial Sequence; identical to SEQ ID NO: 54611
  GFR-binding peptide
  MOD_RES (1)..(34)..(36): Xaa is C or S
  MOD_RES (15)..(16)..(17)..(18)..(19): Xaa is A or G
  MOD_RES (20)..(21)..(22)..(23): Xaa is A or G or is absent

SEQ ID NO: 83763 - protein, 33 aa, Artificial Sequence; identical to SEQ ID NO: 53397
  GFR-binding peptide
  MOD_RES (1)..(32): Xaa is C or S

SEQ ID NO: 83764 - protein, 40 aa, Artificial Sequence; identical to SEQ ID NO: 52197
  GFR-binding peptide
  MOD_RES (3)..(4)..(37)..(39): Xaa is C or S
  MOD_RES (18)..(19)..(20)..(21)..(22): Xaa is A or G
  MOD_RES (23)..(24)..(25)..(26): Xaa is A or G or is absent

SEQ ID NO: 83765 - protein, 37 aa, Artificial Sequence; identical to SEQ ID NO: 53399
  GFR-binding peptide
  MOD_RES (2)..(3)..(36): Xaa is C or S
  MOD_RES (17)..(18)..(19)..(20)..(21): Xaa is A or G
  MOD_RES (22)..(23)..(24)..(25): Xaa is A or G or is absent

SEQ ID NO: 83766 - protein, 37 aa, Artificial Sequence; identical to SEQ ID NO: 19201
  GFR-binding peptide
  MOD_RES (2)..(36): Xaa is C or S

SEQ ID NO: 83767 - protein, 37 aa, Artificial Sequence; identical to SEQ ID NO: 19202
  GFR-binding peptide
  MOD_RES (2)..(2): Xaa is C or S
  MOD_RES (18)..(19)..(20)..(21)..(22): Xaa is A or G
  MOD_RES (23)..(24)..(25)..(26): Xaa is A or G or is absent

SEQ ID NO: 83768 - protein, 36 aa, Artificial Sequence; identical to SEQ ID NO: 19203
  GFR-binding peptide
  MOD_RES (4)..(4): Xaa is C or S
  MOD_RES (18)..(19)..(20)..(21)..(22): Xaa is A or G
  MOD_RES (23)..(24)..(25)..(26): Xaa is A or G or is absent

SEQ ID NO: 83769 - protein, 39 aa, Artificial Sequence; identical to SEQ ID NO: 52203
  GFR-binding peptide
  MOD_RES (5)..(6)..(39): Xaa is C or S
  MOD_RES (20)..(21)..(22)..(23)..(24): Xaa is A or G
  MOD_RES (25)..(26)..(27)..(28): Xaa is A or G or is absent

SEQ ID NO: 83770 - protein, 37 aa, Artificial Sequence; identical to SEQ ID NO: 19927
  GFR-binding peptide
  MOD_RES (4)..(4): Xaa is C or S

SEQ ID NO: 83771 - protein, 39 aa, Artificial Sequence; identical to SEQ ID NO: 55796
  GFR-binding peptide
  MOD_RES (2)..(3)..(36)..(38): Xaa is C or S
  MOD_RES (17)..(18)..(19)..(20)..(21): Xaa is A or G
  MOD_RES (22)..(23)..(24)..(25): Xaa is A or G or is absent

SEQ ID NO: 83772 - protein, 40 aa, Artificial Sequence; identical to SEQ ID NO: 19928
  GFR-binding peptide
  MOD_RES (7)..(7): Xaa is C or S

SEQ ID NO: 83773 - protein, 40 aa, Artificial Sequence; identical to SEQ ID NO: 19204
  GFR-binding peptide
  MOD_RES (5)..(5): Xaa is C or S
  MOD_RES (21)..(22)..(23)..(24)..(25): Xaa is A or G
  MOD_RES (26)..(27)..(28)..(29): Xaa is A or G or is absent

SEQ ID NO: 83774 - protein, 37 aa, Artificial Sequence; identical to SEQ ID NO: 19929
  GFR-binding peptide
  MOD_RES (1)..(35)..(37): Xaa is C or S

SEQ ID NO: 83775 - protein, 32 aa, Artificial Sequence; identical to SEQ ID NO: 52211
  GFR-binding peptide
  MOD_RES (1)..(32): Xaa is C or S

SEQ ID NO: 83776 - protein, 34 aa, Artificial Sequence; identical to SEQ ID NO: 19931
  GFR-binding peptide
  MOD_RES (2)..(2): Xaa is C or S

SEQ ID NO: 83777 - protein, 36 aa, Artificial Sequence; identical to SEQ ID NO: 55809
  GFR-binding peptide
  MOD_RES (5)..(6): Xaa is C or S

SEQ ID NO: 83778 - protein, 40 aa, Artificial Sequence; identical to SEQ ID NO: 19205
  GFR-binding peptide
  MOD_RES (4)..(4): Xaa is C or S
  MOD_RES (20)..(21)..(22)..(23)..(24): Xaa is A or G
  MOD_RES (25)..(26)..(27)..(28): Xaa is A or G or is absent

SEQ ID NO: 83779 - protein, 31 aa, Artificial Sequence; identical to SEQ ID NO: 53411
  GFR-binding peptide
  MOD_RES (1)..(1): Xaa is C or S

SEQ ID NO: 83780 - protein, 41 aa, Artificial Sequence; identical to SEQ ID NO: 19207
  GFR-binding peptide
  MOD_RES (2)..(39)..(41): Xaa is C or S

SEQ ID NO: 83781 - protein, 36 aa, Artificial Sequence; identical to SEQ ID NO: 53413
  GFR-binding peptide
  MOD_RES (1)..(2)..(35): Xaa is C or S
  MOD_RES (16)..(17)..(18)..(19)..(20): Xaa is A or G
  MOD_RES (21)..(22)..(23)..(24): Xaa is A or G or is absent

SEQ ID NO: 83782 - protein, 32 aa, Artificial Sequence; identical to SEQ ID NO: 53415
  GFR-binding peptide
  MOD_RES (14)..(15)..(16)..(17)..(18): Xaa is A or G
  MOD_RES (19)..(20)..(21)..(22): Xaa is A or G or is absent

SEQ ID NO: 83783 - protein, 38 aa, Artificial Sequence; identical to SEQ ID NO: 55811
  GFR-binding peptide
  MOD_RES (4)..(5)..(36)..(38): Xaa is C or S

SEQ ID NO: 83784 - protein, 34 aa, Artificial Sequence; identical to SEQ ID NO: 19935
  GFR-binding peptide

SEQ ID NO: 83785 - protein, 38 aa, Artificial Sequence; identical to SEQ ID NO: 54622
  GFR-binding peptide
  MOD_RES (1)..(2)..(35)..(37): Xaa is C or S
  MOD_RES (16)..(17)..(18)..(19)..(20): Xaa is A or G
  MOD_RES (21)..(22)..(23)..(24): Xaa is A or G or is absent

SEQ ID NO: 83786 - protein, 41 aa, Artificial Sequence; identical to SEQ ID NO: 19936
  GFR-binding peptide
  MOD_RES (1)..(38)..(40): Xaa is C or S

SEQ ID NO: 83787 - protein, 38 aa, Artificial Sequence; identical to SEQ ID NO: 19211
  GFR-binding peptide
  MOD_RES (35)..(37): Xaa is C or S

SEQ ID NO: 83788 - protein, 32 aa, Artificial Sequence; identical to SEQ ID NO: 54626
  GFR-binding peptide
  MOD_RES (31)..(31): Xaa is C or S

SEQ ID NO: 83789 - protein, 38 aa, Artificial Sequence; identical to SEQ ID NO: 52219
  GFR-binding peptide
  MOD_RES (3)..(4)..(37): Xaa is C or S
  MOD_RES (18)..(19)..(20)..(21)..(22): Xaa is A or G
  MOD_RES (23)..(24)..(25)..(26): Xaa is A or G or is absent

SEQ ID NO: 83790 - protein, 37 aa, Artificial Sequence; identical to SEQ ID NO: 19938
  GFR-binding peptide
  MOD_RES (1)..(35)..(37): Xaa is C or S
  MOD_RES (15)..(16)..(17)..(18)..(19): Xaa is A or G
  MOD_RES (20)..(21)..(22)..(23): Xaa is A or G or is absent

SEQ ID NO: 83791 - protein, 38 aa, Artificial Sequence; identical to SEQ ID NO: 53422
  GFR-binding peptide
  MOD_RES (4)..(5)..(38): Xaa is C or S
  MOD_RES (19)..(20)..(21)..(22)..(23): Xaa is A or G
  MOD_RES (24)..(25)..(26)..(27): Xaa is A or G or is absent

SEQ ID NO: 83792 - protein, 43 aa, Artificial Sequence; identical to SEQ ID NO: 19215
  GFR-binding peptide
  MOD_RES (5)..(42): Xaa is C or S
  MOD_RES (21)..(22)..(23)..(24)..(25): Xaa is A or G
  MOD_RES (26)..(27)..(28)..(29): Xaa is A or G or is absent

SEQ ID NO: 83793 - protein, 33 aa, Artificial Sequence; identical to SEQ ID NO: 55821
  GFR-binding peptide
  MOD_RES (1)..(32): Xaa is C or S

SEQ ID NO: 83794 - protein, 37 aa, Artificial Sequence; identical to SEQ ID NO: 54634
  GFR-binding peptide
  MOD_RES (6)..(7): Xaa is C or S

SEQ ID NO: 83795 - protein, 38 aa, Artificial Sequence; identical to SEQ ID NO: 19219
  GFR-binding peptide
  MOD_RES (37)..(37): Xaa is C or S
  MOD_RES (16)..(17)..(18)..(19)..(20): Xaa is A or G
  MOD_RES (21)..(22)..(23)..(24): Xaa is A or G or is absent

SEQ ID NO: 83796 - protein, 41 aa, Artificial Sequence; identical to SEQ ID NO: 19220
  GFR-binding peptide
  MOD_RES (7)..(41): Xaa is C or S

SEQ ID NO: 83797 - protein, 38 aa, Artificial Sequence; identical to SEQ ID NO: 19945
  GFR-binding peptide
  MOD_RES (2)..(2): Xaa is C or S

SEQ ID NO: 83798 - protein, 39 aa, Artificial Sequence; identical to SEQ ID NO: 52231
  GFR-binding peptide
  MOD_RES (5)..(6)..(37)..(39): Xaa is C or S

SEQ ID NO: 83799 - protein, 41 aa, Artificial Sequence; identical to SEQ ID NO: 19221
  GFR-binding peptide
  MOD_RES (1)..(38)..(40): Xaa is C or S
  MOD_RES (17)..(18)..(19)..(20)..(21): Xaa is A or G
  MOD_RES (22)..(23)..(24)..(25): Xaa is A or G or is absent

SEQ ID NO: 83800 - protein, 36 aa, Artificial Sequence; identical to SEQ ID NO: 54638
  GFR-binding peptide
  MOD_RES (5)..(6): Xaa is C or S

SEQ ID NO: 83801 - protein, 37 aa, Artificial Sequence; identical to SEQ ID NO: 55826
  GFR-binding peptide
  MOD_RES (1)..(34)..(36): Xaa is C or S
  MOD_RES (15)..(16)..(17)..(18)..(19): Xaa is A or G
  MOD_RES (20)..(21)..(22)..(23): Xaa is A or G or is absent

SEQ ID NO: 83802 - protein, 36 aa, Artificial Sequence; identical to SEQ ID NO: 19224
  GFR-binding peptide
  MOD_RES (3)..(3): Xaa is C or S

SEQ ID NO: 83803 - protein, 33 aa, Artificial Sequence; identical to SEQ ID NO: 19225
  GFR-binding peptide
  MOD_RES (1)..(1): Xaa is C or S

SEQ ID NO: 83804 - protein, 38 aa, Artificial Sequence; identical to SEQ ID NO: 53435
  GFR-binding peptide
  MOD_RES (3)..(4)..(37): Xaa is C or S
  MOD_RES (18)..(19)..(20)..(21)..(22): Xaa is A or G
  MOD_RES (23)..(24)..(25)..(26): Xaa is A or G or is absent

SEQ ID NO: 83805 - protein, 34 aa, Artificial Sequence; identical to SEQ ID NO: 54642
  GFR-binding peptide
  MOD_RES (2)..(3)..(34): Xaa is C or S

SEQ ID NO: 83806 - protein, 38 aa, Artificial Sequence; identical to SEQ ID NO: 55831
  GFR-binding peptide
  MOD_RES (2)..(3)..(36)..(38): Xaa is C or S
  MOD_RES (17)..(18)..(19)..(20)..(21): Xaa is A or G
  MOD_RES (22)..(23)..(24)..(25): Xaa is A or G or is absent

SEQ ID NO: 83807 - protein, 34 aa, Artificial Sequence; identical to SEQ ID NO: 54643
  GFR-binding peptide
  MOD_RES (1)..(32)..(34): Xaa is C or S

SEQ ID NO: 83808 - protein, 45 aa, Artificial Sequence; identical to SEQ ID NO: 19229
  GFR-binding peptide
  MOD_RES (5)..(42)..(44): Xaa is C or S
  MOD_RES (21)..(22)..(23)..(24)..(25): Xaa is A or G
  MOD_RES (26)..(27)..(28)..(29): Xaa is A or G or is absent

SEQ ID NO: 83809 - protein, 33 aa, Artificial Sequence; identical to SEQ ID NO: 19949
  GFR-binding peptide
  MOD_RES (14)..(15)..(16)..(17)..(18): Xaa is A or G
  MOD_RES (19)..(20)..(21)..(22): Xaa is A or G or is absent

SEQ ID NO: 83810 - protein, 33 aa, Artificial Sequence; identical to SEQ ID NO: 19235
  GFR-binding peptide
  MOD_RES (1)..(1): Xaa is C or S

SEQ ID NO: 83811 - protein, 41 aa, Artificial Sequence; identical to SEQ ID NO: 19237
  GFR-binding peptide
  MOD_RES (7)..(41): Xaa is C or S
  MOD_RES (21)..(22)..(23)..(24)..(25): Xaa is A or G
  MOD_RES (26)..(27)..(28)..(29): Xaa is A or G or is absent

SEQ ID NO: 83812 - protein, 37 aa, Artificial Sequence; identical to SEQ ID NO: 19951
  GFR-binding peptide
  MOD_RES (35)..(37): Xaa is C or S
  MOD_RES (14)..(15)..(16)..(17)..(18): Xaa is A or G
  MOD_RES (19)..(20)..(21)..(22): Xaa is A or G or is absent

SEQ ID NO: 83813 - protein, 43 aa, Artificial Sequence; identical to SEQ ID NO: 19239
  GFR-binding peptide
  MOD_RES (3)..(40)..(42): Xaa is C or S
  MOD_RES (19)..(20)..(21)..(22)..(23): Xaa is A or G
  MOD_RES (24)..(25)..(26)..(27): Xaa is A or G or is absent

SEQ ID NO: 83814 - protein, 39 aa, Artificial Sequence; identical to SEQ ID NO: 52244
  GFR-binding peptide
  MOD_RES (6)..(7): Xaa is C or S
  MOD_RES (21)..(22)..(23)..(24)..(25): Xaa is A or G
  MOD_RES (26)..(27)..(28)..(29): Xaa is A or G or is absent

SEQ ID NO: 83815 - protein, 42 aa, Artificial Sequence; identical to SEQ ID NO: 19240
  GFR-binding peptide
  MOD_RES (5)..(39)..(41): Xaa is C or S
  MOD_RES (19)..(20)..(21)..(22)..(23): Xaa is A or G
  MOD_RES (24)..(25)..(26)..(27): Xaa is A or G or is absent

SEQ ID NO: 83816 - protein, 42 aa, Artificial Sequence; identical to SEQ ID NO: 19953
  GFR-binding peptide
  MOD_RES (5)..(42): Xaa is C or S
  MOD_RES (21)..(22)..(23)..(24)..(25): Xaa is A or G
  MOD_RES (26)..(27)..(28)..(29): Xaa is A or G or is absent

SEQ ID NO: 83817 - protein, 38 aa, Artificial Sequence; identical to SEQ ID NO: 52248
  GFR-binding peptide
  MOD_RES (5)..(6): Xaa is C or S
  MOD_RES (20)..(21)..(22)..(23)..(24): Xaa is A or G
  MOD_RES (25)..(26)..(27)..(28): Xaa is A or G or is absent

SEQ ID NO: 83818 - protein, 38 aa, Artificial Sequence; identical to SEQ ID NO: 54655
  GFR-binding peptide
  MOD_RES (5)..(6)..(37): Xaa is C or S

SEQ ID NO: 83819 - protein, 35 aa, Artificial Sequence; identical to SEQ ID NO: 19243
  GFR-binding peptide
  MOD_RES (34)..(34): Xaa is C or S

SEQ ID NO: 83820 - protein, 36 aa, Artificial Sequence; identical to SEQ ID NO: 19244
  GFR-binding peptide
  MOD_RES (35)..(35): Xaa is C or S
  MOD_RES (14)..(15)..(16)..(17)..(18): Xaa is A or G
  MOD_RES (19)..(20)..(21)..(22): Xaa is A or G or is absent

SEQ ID NO: 83821 - protein, 38 aa, Artificial Sequence; identical to SEQ ID NO: 52251
  GFR-binding peptide
  MOD_RES (3)..(4)..(35)..(37): Xaa is C or S

SEQ ID NO: 83822 - protein, 38 aa, Artificial Sequence; identical to SEQ ID NO: 54660
  GFR-binding peptide
  MOD_RES (5)..(6)..(37): Xaa is C or S

SEQ ID NO: 83823 - protein, 42 aa, Artificial Sequence; identical to SEQ ID NO: 19246
  GFR-binding peptide
  MOD_RES (5)..(39)..(41): Xaa is C or S
  MOD_RES (19)..(20)..(21)..(22)..(23): Xaa is A or G
  MOD_RES (24)..(25)..(26)..(27): Xaa is A or G or is absent

SEQ ID NO: 83824 - protein, 32 aa, Artificial Sequence; identical to SEQ ID NO: 19248
  GFR-binding peptide

SEQ ID NO: 83825 - protein, 38 aa, Artificial Sequence; identical to SEQ ID NO: 19249
  GFR-binding peptide
  MOD_RES (4)..(38): Xaa is C or S
  MOD_RES (18)..(19)..(20)..(21)..(22): Xaa is A or G
  MOD_RES (23)..(24)..(25)..(26): Xaa is A or G or is absent

SEQ ID NO: 83826 - protein, 43 aa, Artificial Sequence; identical to SEQ ID NO: 19959
  GFR-binding peptide
  MOD_RES (7)..(41)..(43): Xaa is C or S

SEQ ID NO: 83827 - protein, 40 aa, Artificial Sequence; identical to SEQ ID NO: 19961
  GFR-binding peptide
  MOD_RES (6)..(40): Xaa is C or S
  MOD_RES (20)..(21)..(22)..(23)..(24): Xaa is A or G
  MOD_RES (25)..(26)..(27)..(28): Xaa is A or G or is absent

SEQ ID NO: 83828 - protein, 41 aa, Artificial Sequence; identical to SEQ ID NO: 19251
  GFR-binding peptide
  MOD_RES (1)..(38)..(40): Xaa is C or S

SEQ ID NO: 83829 - protein, 42 aa, Artificial Sequence; identical to SEQ ID NO: 19252
  GFR-binding peptide
  MOD_RES (6)..(40)..(42): Xaa is C or S

SEQ ID NO: 83830 - protein, 38 aa, Artificial Sequence; identical to SEQ ID NO: 19962
  GFR-binding peptide
  MOD_RES (4)..(4): Xaa is C or S
  MOD_RES (20)..(21)..(22)..(23)..(24): Xaa is A or G
  MOD_RES (25)..(26)..(27)..(28): Xaa is A or G or is absent

SEQ ID NO: 83831 - protein, 37 aa, Artificial Sequence; identical to SEQ ID NO: 19963
  GFR-binding peptide
  MOD_RES (4)..(4): Xaa is C or S
  MOD_RES (18)..(19)..(20)..(21)..(22): Xaa is A or G
  MOD_RES (23)..(24)..(25)..(26): Xaa is A or G or is absent

SEQ ID NO: 83832 - protein, 36 aa, Artificial Sequence; identical to SEQ ID NO: 55853
  GFR-binding peptide
  MOD_RES (3)..(4): Xaa is C or S
  MOD_RES (18)..(19)..(20)..(21)..(22): Xaa is A or G
  MOD_RES (23)..(24)..(25)..(26): Xaa is A or G or is absent

SEQ ID NO: 83833 - protein, 43 aa, Artificial Sequence; identical to SEQ ID NO: 19964
  GFR-binding peptide
  MOD_RES (5)..(42): Xaa is C or S
  MOD_RES (21)..(22)..(23)..(24)..(25): Xaa is A or G
  MOD_RES (26)..(27)..(28)..(29): Xaa is A or G or is absent

SEQ ID NO: 83834 - protein, 37 aa, Artificial Sequence; identical to SEQ ID NO: 19965
  GFR-binding peptide
  MOD_RES (35)..(37): Xaa is C or S
  MOD_RES (14)..(15)..(16)..(17)..(18): Xaa is A or G
  MOD_RES (19)..(20)..(21)..(22): Xaa is A or G or is absent

SEQ ID NO: 83835 - protein, 32 aa, Artificial Sequence; identical to SEQ ID NO: 19253
  GFR-binding peptide
  MOD_RES (14)..(15)..(16)..(17)..(18): Xaa is A or G
  MOD_RES (19)..(20)..(21)..(22): Xaa is A or G or is absent

SEQ ID NO: 83836 - protein, 33 aa, Artificial Sequence; identical to SEQ ID NO: 19254
  GFR-binding peptide

SEQ ID NO: 83837 - protein, 42 aa, Artificial Sequence; identical to SEQ ID NO: 19255
  GFR-binding peptide
  MOD_RES (2)..(39)..(41): Xaa is C or S

SEQ ID NO: 83838 - protein, 37 aa, Artificial Sequence; identical to SEQ ID NO: 19966
  GFR-binding peptide
  MOD_RES (35)..(37): Xaa is C or S
  MOD_RES (14)..(15)..(16)..(17)..(18): Xaa is A or G
  MOD_RES (19)..(20)..(21)..(22): Xaa is A or G or is absent

SEQ ID NO: 83839 - protein, 38 aa, Artificial Sequence; identical to SEQ ID NO: 52273
  GFR-binding peptide
  MOD_RES (5)..(6): Xaa is C or S
  MOD_RES (20)..(21)..(22)..(23)..(24): Xaa is A or G
  MOD_RES (25)..(26)..(27)..(28): Xaa is A or G or is absent

SEQ ID NO: 83840 - protein, 35 aa, Artificial Sequence; identical to SEQ ID NO: 52276
  GFR-binding peptide
  MOD_RES (4)..(5): Xaa is C or S

SEQ ID NO: 83841 - protein, 39 aa, Artificial Sequence; identical to SEQ ID NO: 19258
  GFR-binding peptide
  MOD_RES (6)..(6): Xaa is C or S

SEQ ID NO: 83842 - protein, 39 aa, Artificial Sequence; identical to SEQ ID NO: 19259
  GFR-binding peptide
  MOD_RES (3)..(3): Xaa is C or S
  MOD_RES (19)..(20)..(21)..(22)..(23): Xaa is A or G
  MOD_RES (24)..(25)..(26)..(27): Xaa is A or G or is absent

SEQ ID NO: 83843 - protein, 36 aa, Artificial Sequence; identical to SEQ ID NO: 54679
  GFR-binding peptide
  MOD_RES (5)..(6): Xaa is C or S

SEQ ID NO: 83844 - protein, 36 aa, Artificial Sequence; identical to SEQ ID NO: 52283
  GFR-binding peptide
  MOD_RES (2)..(3)..(36): Xaa is C or S
  MOD_RES (17)..(18)..(19)..(20)..(21): Xaa is A or G
  MOD_RES (22)..(23)..(24)..(25): Xaa is A or G or is absent

SEQ ID NO: 83845 - protein, 38 aa, Artificial Sequence; identical to SEQ ID NO: 52285
  GFR-binding peptide
  MOD_RES (6)..(7)..(38): Xaa is C or S

SEQ ID NO: 83846 - protein, 37 aa, Artificial Sequence; identical to SEQ ID NO: 54681
  GFR-binding peptide
  MOD_RES (5)..(6)..(37): Xaa is C or S

SEQ ID NO: 83847 - protein, 40 aa, Artificial Sequence; identical to SEQ ID NO: 19263
  GFR-binding peptide
  MOD_RES (2)..(39): Xaa is C or S
  MOD_RES (18)..(19)..(20)..(21)..(22): Xaa is A or G
  MOD_RES (23)..(24)..(25)..(26): Xaa is A or G or is absent

SEQ ID NO: 83848 - protein, 37 aa, Artificial Sequence; identical to SEQ ID NO: 19264
  GFR-binding peptide
  MOD_RES (34)..(36): Xaa is C or S
  MOD_RES (14)..(15)..(16)..(17)..(18): Xaa is A or G
  MOD_RES (19)..(20)..(21)..(22): Xaa is A or G or is absent

SEQ ID NO: 83849 - protein, 34 aa, Artificial Sequence; identical to SEQ ID NO: 52292
  GFR-binding peptide
  MOD_RES (31)..(33): Xaa is C or S

SEQ ID NO: 83850 - protein, 34 aa, Artificial Sequence; identical to SEQ ID NO: 19271
  GFR-binding peptide
  MOD_RES (1)..(1): Xaa is C or S

SEQ ID NO: 83851 - protein, 34 aa, Artificial Sequence; identical to SEQ ID NO: 52298
  GFR-binding peptide
  MOD_RES (1)..(34): Xaa is C or S
  MOD_RES (15)..(16)..(17)..(18)..(19): Xaa is A or G
  MOD_RES (20)..(21)..(22)..(23): Xaa is A or G or is absent

SEQ ID NO: 83852 - protein, 35 aa, Artificial Sequence; identical to SEQ ID NO: 19973
  GFR-binding peptide
  MOD_RES (15)..(16)..(17)..(18)..(19): Xaa is A or G
  MOD_RES (20)..(21)..(22)..(23): Xaa is A or G or is absent

SEQ ID NO: 83853 - protein, 34 aa, Artificial Sequence; identical to SEQ ID NO: 19976
  GFR-binding peptide
  MOD_RES (15)..(16)..(17)..(18)..(19): Xaa is A or G
  MOD_RES (20)..(21)..(22)..(23): Xaa is A or G or is absent

SEQ ID NO: 83854 - protein, 36 aa, Artificial Sequence; identical to SEQ ID NO: 52308
  GFR-binding peptide
  MOD_RES (1)..(34)..(36): Xaa is C or S
  MOD_RES (15)..(16)..(17)..(18)..(19): Xaa is A or G
  MOD_RES (20)..(21)..(22)..(23): Xaa is A or G or is absent

SEQ ID NO: 83855 - protein, 35 aa, Artificial Sequence; identical to SEQ ID NO: 19977
  GFR-binding peptide
  MOD_RES (16)..(17)..(18)..(19)..(20): Xaa is A or G
  MOD_RES (21)..(22)..(23)..(24): Xaa is A or G or is absent

SEQ ID NO: 83856 - protein, 39 aa, Artificial Sequence; identical to SEQ ID NO: 19979
  GFR-binding peptide
  MOD_RES (36)..(38): Xaa is C or S
  MOD_RES (15)..(16)..(17)..(18)..(19): Xaa is A or G
  MOD_RES (20)..(21)..(22)..(23): Xaa is A or G or is absent

SEQ ID NO: 83857 - protein, 40 aa, Artificial Sequence; identical to SEQ ID NO: 52309
  GFR-binding peptide
  MOD_RES (6)..(7)..(38)..(40): Xaa is C or S

SEQ ID NO: 83858 - protein, 40 aa, Artificial Sequence; identical to SEQ ID NO: 53495
  GFR-binding peptide
  MOD_RES (5)..(6)..(39): Xaa is C or S
  MOD_RES (20)..(21)..(22)..(23)..(24): Xaa is A or G
  MOD_RES (25)..(26)..(27)..(28): Xaa is A or G or is absent

SEQ ID NO: 83859 - protein, 34 aa, Artificial Sequence; identical to SEQ ID NO: 19273
  GFR-binding peptide
  MOD_RES (15)..(16)..(17)..(18)..(19): Xaa is A or G
  MOD_RES (20)..(21)..(22)..(23): Xaa is A or G or is absent

SEQ ID NO: 83860 - protein, 34 aa, Artificial Sequence; identical to SEQ ID NO: 19982
  GFR-binding peptide
  MOD_RES (2)..(2): Xaa is C or S
  MOD_RES (16)..(17)..(18)..(19)..(20): Xaa is A or G
  MOD_RES (21)..(22)..(23)..(24): Xaa is A or G or is absent

SEQ ID NO: 83861 - protein, 42 aa, Artificial Sequence; identical to SEQ ID NO: 19983
  GFR-binding peptide
  MOD_RES (6)..(40)..(42): Xaa is C or S
  MOD_RES (20)..(21)..(22)..(23)..(24): Xaa is A or G
  MOD_RES (25)..(26)..(27)..(28): Xaa is A or G or is absent

SEQ ID NO: 83862 - protein, 41 aa, Artificial Sequence; identical to SEQ ID NO: 55893
  GFR-binding peptide
  MOD_RES (6)..(7)..(40): Xaa is C or S
  MOD_RES (21)..(22)..(23)..(24)..(25): Xaa is A or G
  MOD_RES (26)..(27)..(28)..(29): Xaa is A or G or is absent

SEQ ID NO: 83863 - protein, 38 aa, Artificial Sequence; identical to SEQ ID NO: 19986
  GFR-binding peptide
  MOD_RES (36)..(38): Xaa is C or S
  MOD_RES (15)..(16)..(17)..(18)..(19): Xaa is A or G
  MOD_RES (20)..(21)..(22)..(23): Xaa is A or G or is absent

SEQ ID NO: 83864 - protein, 33 aa, Artificial Sequence; identical to SEQ ID NO: 19276
  GFR-binding peptide
  MOD_RES (1)..(1): Xaa is C or S

SEQ ID NO: 83865 - protein, 37 aa, Artificial Sequence; identical to SEQ ID NO: 54711
  GFR-binding peptide
  MOD_RES (4)..(5)..(36): Xaa is C or S

SEQ ID NO: 83866 - protein, 35 aa, Artificial Sequence; identical to SEQ ID NO: 19988
  GFR-binding peptide
  MOD_RES (35)..(35): Xaa is C or S

SEQ ID NO: 83867 - protein, 38 aa, Artificial Sequence; identical to SEQ ID NO: 19989
  GFR-binding peptide
  MOD_RES (5)..(5): Xaa is C or S

SEQ ID NO: 83868 - protein, 36 aa, Artificial Sequence; identical to SEQ ID NO: 54714
  GFR-binding peptide
  MOD_RES (33)..(35): Xaa is C or S
  MOD_RES (14)..(15)..(16)..(17)..(18): Xaa is A or G
  MOD_RES (19)..(20)..(21)..(22): Xaa is A or G or is absent

SEQ ID NO: 83869 - protein, 41 aa, Artificial Sequence; identical to SEQ ID NO: 19278
  GFR-binding peptide
  MOD_RES (4)..(38)..(40): Xaa is C or S

SEQ ID NO: 83870 - protein, 42 aa, Artificial Sequence; identical to SEQ ID NO: 53520
  GFR-binding peptide
  MOD_RES (6)..(7)..(40)..(42): Xaa is C or S
  MOD_RES (21)..(22)..(23)..(24)..(25): Xaa is A or G
  MOD_RES (26)..(27)..(28)..(29): Xaa is A or G or is absent

SEQ ID NO: 83871 - protein, 41 aa, Artificial Sequence; identical to SEQ ID NO: 19281
  GFR-binding peptide
  MOD_RES (7)..(41): Xaa is C or S

SEQ ID NO: 83872 - protein, 37 aa, Artificial Sequence; identical to SEQ ID NO: 19994
  GFR-binding peptide
  MOD_RES (3)..(37): Xaa is C or S

SEQ ID NO: 83873 - protein, 33 aa, Artificial Sequence; identical to SEQ ID NO: 53522
  GFR-binding peptide
  MOD_RES (1)..(2)..(33): Xaa is C or S

SEQ ID NO: 83874 - protein, 41 aa, Artificial Sequence; identical to SEQ ID NO: 19282
  GFR-binding peptide
  MOD_RES (7)..(41): Xaa is C or S
  MOD_RES (21)..(22)..(23)..(24)..(25): Xaa is A or G
  MOD_RES (26)..(27)..(28)..(29): Xaa is A or G or is absent

SEQ ID NO: 83875 - protein, 37 aa, Artificial Sequence; identical to SEQ ID NO: 19996
  GFR-binding peptide
  MOD_RES (3)..(37): Xaa is C or S
  MOD_RES (17)..(18)..(19)..(20)..(21): Xaa is A or G
  MOD_RES (22)..(23)..(24)..(25): Xaa is A or G or is absent

SEQ ID NO: 83876 - protein, 35 aa, Artificial Sequence; identical to SEQ ID NO: 53524
  GFR-binding peptide
  MOD_RES (3)..(4)..(35): Xaa is C or S

SEQ ID NO: 83877 - protein, 40 aa, Artificial Sequence; identical to SEQ ID NO: 19285
  GFR-binding peptide
  MOD_RES (37)..(39): Xaa is C or S
  MOD_RES (16)..(17)..(18)..(19)..(20): Xaa is A or G
  MOD_RES (21)..(22)..(23)..(24): Xaa is A or G or is absent

SEQ ID NO: 83878 - protein, 34 aa, Artificial Sequence; identical to SEQ ID NO: 19286
  GFR-binding peptide
  MOD_RES (34)..(34): Xaa is C or S
  MOD_RES (14)..(15)..(16)..(17)..(18): Xaa is A or G
  MOD_RES (19)..(20)..(21)..(22): Xaa is A or G or is absent

SEQ ID NO: 83879 - protein, 38 aa, Artificial Sequence; identical to SEQ ID NO: 19997
  GFR-binding peptide
  MOD_RES (2)..(2): Xaa is C or S

SEQ ID NO: 83880 - protein, 40 aa, Artificial Sequence; identical to SEQ ID NO: 54725
  GFR-binding peptide
  MOD_RES (5)..(6)..(39): Xaa is C or S
  MOD_RES (20)..(21)..(22)..(23)..(24): Xaa is A or G
  MOD_RES (25)..(26)..(27)..(28): Xaa is A or G or is absent

SEQ ID NO: 83881 - protein, 37 aa, Artificial Sequence; identical to SEQ ID NO: 19287
  GFR-binding peptide
  MOD_RES (2)..(2): Xaa is C or S
  MOD_RES (18)..(19)..(20)..(21)..(22): Xaa is A or G
  MOD_RES (23)..(24)..(25)..(26): Xaa is A or G or is absent

SEQ ID NO: 83882 - protein, 32 aa, Artificial Sequence; identical to SEQ ID NO: 53528
  GFR-binding peptide
  MOD_RES (31)..(31): Xaa is C or S

SEQ ID NO: 83883 - protein, 38 aa, Artificial Sequence; identical to SEQ ID NO: 53530
  GFR-binding peptide
  MOD_RES (3)..(4)..(35)..(37): Xaa is C or S

SEQ ID NO: 83884 - protein, 33 aa, Artificial Sequence; identical to SEQ ID NO: 53532
  GFR-binding peptide
  MOD_RES (2)..(3): Xaa is C or S

SEQ ID NO: 83885 - protein, 38 aa, Artificial Sequence; identical to SEQ ID NO: 52351
  GFR-binding peptide
  MOD_RES (5)..(6)..(37): Xaa is C or S

SEQ ID NO: 83886 - protein, 40 aa, Artificial Sequence; identical to SEQ ID NO: 19288
  GFR-binding peptide
  MOD_RES (4)..(38)..(40): Xaa is C or S

SEQ ID NO: 83887 - protein, 36 aa, Artificial Sequence; identical to SEQ ID NO: 19999
  GFR-binding peptide
  MOD_RES (34)..(36): Xaa is C or S
  MOD_RES (14)..(15)..(16)..(17)..(18): Xaa is A or G
  MOD_RES (19)..(20)..(21)..(22): Xaa is A or G or is absent

SEQ ID NO: 83888 - protein, 35 aa, Artificial Sequence; identical to SEQ ID NO: 52354
  GFR-binding peptide
  MOD_RES (2)..(3): Xaa is C or S
  MOD_RES (17)..(18)..(19)..(20)..(21): Xaa is A or G
  MOD_RES (22)..(23)..(24)..(25): Xaa is A or G or is absent

SEQ ID NO: 83889 - protein, 36 aa, Artificial Sequence; identical to SEQ ID NO: 20000
  GFR-binding peptide
  MOD_RES (1)..(1): Xaa is C or S
  MOD_RES (17)..(18)..(19)..(20)..(21): Xaa is A or G
  MOD_RES (22)..(23)..(24)..(25): Xaa is A or G or is absent

SEQ ID NO: 83890 - protein, 40 aa, Artificial Sequence; identical to SEQ ID NO: 20001
  GFR-binding peptide
  MOD_RES (6)..(40): Xaa is C or S

SEQ ID NO: 83891 - protein, 42 aa, Artificial Sequence; identical to SEQ ID NO: 19290
  GFR-binding peptide
  MOD_RES (4)..(41): Xaa is C or S
  MOD_RES (20)..(21)..(22)..(23)..(24): Xaa is A or G
  MOD_RES (25)..(26)..(27)..(28): Xaa is A or G or is absent

SEQ ID NO: 83892 - protein, 37 aa, Artificial Sequence; identical to SEQ ID NO: 20003
  GFR-binding peptide
  MOD_RES (1)..(35)..(37): Xaa is C or S
  MOD_RES (15)..(16)..(17)..(18)..(19): Xaa is A or G
  MOD_RES (20)..(21)..(22)..(23): Xaa is A or G or is absent

SEQ ID NO: 83893 - protein, 40 aa, Artificial Sequence; identical to SEQ ID NO: 20004
  GFR-binding peptide
  MOD_RES (6)..(40): Xaa is C or S

SEQ ID NO: 83894 - protein, 36 aa, Artificial Sequence; identical to SEQ ID NO: 20005
  GFR-binding peptide
  MOD_RES (2)..(2): Xaa is C or S
  MOD_RES (18)..(19)..(20)..(21)..(22): Xaa is A or G
  MOD_RES (23)..(24)..(25)..(26): Xaa is A or G or is absent

SEQ ID NO: 83895 - protein, 40 aa, Artificial Sequence; identical to SEQ ID NO: 20007
  GFR-binding peptide
  MOD_RES (3)..(40): Xaa is C or S
  MOD_RES (19)..(20)..(21)..(22)..(23): Xaa is A or G
  MOD_RES (24)..(25)..(26)..(27): Xaa is A or G or is absent

SEQ ID NO: 83896 - protein, 34 aa, Artificial Sequence; identical to SEQ ID NO: 20009
  GFR-binding peptide
  MOD_RES (16)..(17)..(18)..(19)..(20): Xaa is A or G
  MOD_RES (21)..(22)..(23)..(24): Xaa is A or G or is absent

SEQ ID NO: 83897 - protein, 39 aa, Artificial Sequence; identical to SEQ ID NO: 55928
  GFR-binding peptide
  MOD_RES (6)..(7)..(38): Xaa is C or S

SEQ ID NO: 83898 - protein, 32 aa, Artificial Sequence; identical to SEQ ID NO: 19292
  GFR-binding peptide
  MOD_RES (14)..(15)..(16)..(17)..(18): Xaa is A or G
  MOD_RES (19)..(20)..(21)..(22): Xaa is A or G or is absent

SEQ ID NO: 83899 - protein, 35 aa, Artificial Sequence; identical to SEQ ID NO: 54739
  GFR-binding peptide
  MOD_RES (4)..(5): Xaa is C or S

SEQ ID NO: 83900 - protein, 32 aa, Artificial Sequence; identical to SEQ ID NO: 19293
  GFR-binding peptide
  MOD_RES (14)..(15)..(16)..(17)..(18): Xaa is A or G
  MOD_RES (19)..(20)..(21)..(22): Xaa is A or G or is absent

SEQ ID NO: 83901 - protein, 40 aa, Artificial Sequence; identical to SEQ ID NO: 53550
  GFR-binding peptide
  MOD_RES (4)..(5)..(38)..(40): Xaa is C or S
  MOD_RES (19)..(20)..(21)..(22)..(23): Xaa is A or G
  MOD_RES (24)..(25)..(26)..(27): Xaa is A or G or is absent

SEQ ID NO: 83902 - protein, 38 aa, Artificial Sequence; identical to SEQ ID NO: 54743
  GFR-binding peptide
  MOD_RES (5)..(6): Xaa is C or S
  MOD_RES (20)..(21)..(22)..(23)..(24): Xaa is A or G
  MOD_RES (25)..(26)..(27)..(28): Xaa is A or G or is absent

SEQ ID NO: 83903 - protein, 40 aa, Artificial Sequence; identical to SEQ ID NO: 20011
  GFR-binding peptide
  MOD_RES (37)..(39): Xaa is C or S

SEQ ID NO: 83904 - protein, 41 aa, Artificial Sequence; identical to SEQ ID NO: 54746
  GFR-binding peptide
  MOD_RES (6)..(7)..(38)..(40): Xaa is C or S

SEQ ID NO: 83905 - protein, 41 aa, Artificial Sequence; identical to SEQ ID NO: 19296
  GFR-binding peptide
  MOD_RES (5)..(39)..(41): Xaa is C or S

SEQ ID NO: 83906 - protein, 36 aa, Artificial Sequence; identical to SEQ ID NO: 20012
  GFR-binding peptide
  MOD_RES (35)..(35): Xaa is C or S

SEQ ID NO: 83907 - protein, 33 aa, Artificial Sequence; identical to SEQ ID NO: 20015
  GFR-binding peptide

SEQ ID NO: 83908 - protein, 38 aa, Artificial Sequence; identical to SEQ ID NO: 55937
  GFR-binding peptide
  MOD_RES (4)..(5)..(38): Xaa is C or S
  MOD_RES (19)..(20)..(21)..(22)..(23): Xaa is A or G
  MOD_RES (24)..(25)..(26)..(27): Xaa is A or G or is absent

SEQ ID NO: 83909 - protein, 36 aa, Artificial Sequence; identical to SEQ ID NO: 19297
  GFR-binding peptide
  MOD_RES (3)..(3): Xaa is C or S
  MOD_RES (17)..(18)..(19)..(20)..(21): Xaa is A or G
  MOD_RES (22)..(23)..(24)..(25): Xaa is A or G or is absent

SEQ ID NO: 83910 - protein, 35 aa, Artificial Sequence; identical to SEQ ID NO: 52373
  GFR-binding peptide
  MOD_RES (1)..(32)..(34): Xaa is C or S

SEQ ID NO: 83911 - protein, 36 aa, Artificial Sequence; identical to SEQ ID NO: 55938
  GFR-binding peptide
  MOD_RES (1)..(2)..(33)..(35): Xaa is C or S

SEQ ID NO: 83912 - protein, 34 aa, Artificial Sequence; identical to SEQ ID NO: 19300
  GFR-binding peptide
  MOD_RES (16)..(17)..(18)..(19)..(20): Xaa is A or G
  MOD_RES (21)..(22)..(23)..(24): Xaa is A or G or is absent

SEQ ID NO: 83913 - protein, 36 aa, Artificial Sequence; identical to SEQ ID NO: 20019
  GFR-binding peptide
  MOD_RES (36)..(36): Xaa is C or S
  MOD_RES (15)..(16)..(17)..(18)..(19): Xaa is A or G
  MOD_RES (20)..(21)..(22)..(23): Xaa is A or G or is absent

SEQ ID NO: 83914 - protein, 39 aa, Artificial Sequence; identical to SEQ ID NO: 20020
  GFR-binding peptide
  MOD_RES (4)..(38): Xaa is C or S
  MOD_RES (18)..(19)..(20)..(21)..(22): Xaa is A or G
  MOD_RES (23)..(24)..(25)..(26): Xaa is A or G or is absent

SEQ ID NO: 83915 - protein, 41 aa, Artificial Sequence; identical to SEQ ID NO: 19302
  GFR-binding peptide
  MOD_RES (4)..(41): Xaa is C or S
  MOD_RES (20)..(21)..(22)..(23)..(24): Xaa is A or G
  MOD_RES (25)..(26)..(27)..(28): Xaa is A or G or is absent

SEQ ID NO: 83916 - protein, 40 aa, Artificial Sequence; identical to SEQ ID NO: 55945
  GFR-binding peptide
  MOD_RES (5)..(6)..(39): Xaa is C or S
  MOD_RES (20)..(21)..(22)..(23)..(24): Xaa is A or G
  MOD_RES (25)..(26)..(27)..(28): Xaa is A or G or is absent

SEQ ID NO: 83917 - protein, 39 aa, Artificial Sequence; identical to SEQ ID NO: 54757
  GFR-binding peptide
  MOD_RES (6)..(7)..(38): Xaa is C or S

SEQ ID NO: 83918 - protein, 35 aa, Artificial Sequence; identical to SEQ ID NO: 19304
  GFR-binding peptide
  MOD_RES (2)..(2): Xaa is C or S
  MOD_RES (16)..(17)..(18)..(19)..(20): Xaa is A or G
  MOD_RES (21)..(22)..(23)..(24): Xaa is A or G or is absent

SEQ ID NO: 83919 - protein, 33 aa, Artificial Sequence; identical to SEQ ID NO: 19305
  GFR-binding peptide
  MOD_RES (1)..(1): Xaa is C or S
  MOD_RES (15)..(16)..(17)..(18)..(19): Xaa is A or G
  MOD_RES (20)..(21)..(22)..(23): Xaa is A or G or is absent

SEQ ID NO: 83920 - protein, 36 aa, Artificial Sequence; identical to SEQ ID NO: 54758
  GFR-binding peptide
  MOD_RES (1)..(2)..(33)..(35): Xaa is C or S

SEQ ID NO: 83921 - protein, 41 aa, Artificial Sequence; identical to SEQ ID NO: 20023
  GFR-binding peptide
  MOD_RES (5)..(5): Xaa is C or S
  MOD_RES (21)..(22)..(23)..(24)..(25): Xaa is A or G
  MOD_RES (26)..(27)..(28)..(29): Xaa is A or G or is absent

SEQ ID NO: 83922 - protein, 42 aa, Artificial Sequence; identical to SEQ ID NO: 20024
  GFR-binding peptide
  MOD_RES (2)..(39)..(41): Xaa is C or S
  MOD_RES (18)..(19)..(20)..(21)..(22): Xaa is A or G
  MOD_RES (23)..(24)..(25)..(26): Xaa is A or G or is absent

SEQ ID NO: 83923 - protein, 37 aa, Artificial Sequence; identical to SEQ ID NO: 54761
  GFR-binding peptide
  MOD_RES (2)..(3)..(34)..(36): Xaa is C or S

SEQ ID NO: 83924 - protein, 40 aa, Artificial Sequence; identical to SEQ ID NO: 54762
  GFR-binding peptide
  MOD_RES (4)..(5)..(38)..(40): Xaa is C or S
  MOD_RES (19)..(20)..(21)..(22)..(23): Xaa is A or G
  MOD_RES (24)..(25)..(26)..(27): Xaa is A or G or is absent

SEQ ID NO: 83925 - protein, 39 aa, Artificial Sequence; identical to SEQ ID NO: 20026
  GFR-binding peptide
  MOD_RES (2)..(36)..(38): Xaa is C or S

SEQ ID NO: 83926 - protein, 37 aa, Artificial Sequence; identical to SEQ ID NO: 19307
  GFR-binding peptide
  MOD_RES (34)..(36): Xaa is C or S
  MOD_RES (14)..(15)..(16)..(17)..(18): Xaa is A or G
  MOD_RES (19)..(20)..(21)..(22): Xaa is A or G or is absent

SEQ ID NO: 83927 - protein, 37 aa, Artificial Sequence; identical to SEQ ID NO: 55955
  GFR-binding peptide
  MOD_RES (4)..(5)..(36): Xaa is C or S

SEQ ID NO: 83928 - protein, 41 aa, Artificial Sequence; identical to SEQ ID NO: 19311
  GFR-binding peptide
  MOD_RES (5)..(5): Xaa is C or S
  MOD_RES (21)..(22)..(23)..(24)..(25): Xaa is A or G
  MOD_RES (26)..(27)..(28)..(29): Xaa is A or G or is absent

SEQ ID NO: 83929 - protein, 36 aa, Artificial Sequence; identical to SEQ ID NO: 19313
  GFR-binding peptide
  MOD_RES (1)..(35): Xaa is C or S

SEQ ID NO: 83930 - protein, 35 aa, Artificial Sequence; identical to SEQ ID NO: 19314
  GFR-binding peptide

SEQ ID NO: 83931 - protein, 38 aa, Artificial Sequence; identical to SEQ ID NO: 19315
  GFR-binding peptide
  MOD_RES (2)..(36)..(38): Xaa is C or S
  MOD_RES (16)..(17)..(18)..(19)..(20): Xaa is A or G
  MOD_RES (21)..(22)..(23)..(24): Xaa is A or G or is absent

SEQ ID NO: 83932 - protein, 42 aa, Artificial Sequence; identical to SEQ ID NO: 20030
  GFR-binding peptide
  MOD_RES (7)..(41): Xaa is C or S
  MOD_RES (21)..(22)..(23)..(24)..(25): Xaa is A or G
  MOD_RES (26)..(27)..(28)..(29): Xaa is A or G or is absent

SEQ ID NO: 83933 - protein, 35 aa, Artificial Sequence; identical to SEQ ID NO: 54770
  GFR-binding peptide
  MOD_RES (2)..(3): Xaa is C or S
  MOD_RES (17)..(18)..(19)..(20)..(21): Xaa is A or G
  MOD_RES (22)..(23)..(24)..(25): Xaa is A or G or is absent

SEQ ID NO: 83934 - protein, 39 aa, Artificial Sequence; identical to SEQ ID NO: 55965
  GFR-binding peptide
  MOD_RES (2)..(3)..(36)..(38): Xaa is C or S
  MOD_RES (17)..(18)..(19)..(20)..(21): Xaa is A or G
  MOD_RES (22)..(23)..(24)..(25): Xaa is A or G or is absent

SEQ ID NO: 83935 - protein, 41 aa, Artificial Sequence; identical to SEQ ID NO: 20031
  GFR-binding peptide
  MOD_RES (6)..(40): Xaa is C or S
  MOD_RES (20)..(21)..(22)..(23)..(24): Xaa is A or G
  MOD_RES (25)..(26)..(27)..(28): Xaa is A or G or is absent

SEQ ID NO: 83936 - protein, 38 aa, Artificial Sequence; identical to SEQ ID NO: 19318
  GFR-binding peptide
  MOD_RES (3)..(37): Xaa is C or S
  MOD_RES (17)..(18)..(19)..(20)..(21): Xaa is A or G
  MOD_RES (22)..(23)..(24)..(25): Xaa is A or G or is absent

SEQ ID NO: 83937 - protein, 36 aa, Artificial Sequence; identical to SEQ ID NO: 19319
  GFR-binding peptide
  MOD_RES (36)..(36): Xaa is C or S
  MOD_RES (15)..(16)..(17)..(18)..(19): Xaa is A or G
  MOD_RES (20)..(21)..(22)..(23): Xaa is A or G or is absent

SEQ ID NO: 83938 - protein, 37 aa, Artificial Sequence; identical to SEQ ID NO: 19320
  GFR-binding peptide
  MOD_RES (4)..(4): Xaa is C or S
  MOD_RES (18)..(19)..(20)..(21)..(22): Xaa is A or G
  MOD_RES (23)..(24)..(25)..(26): Xaa is A or G or is absent

SEQ ID NO: 83939 - protein, 41 aa, Artificial Sequence; identical to SEQ ID NO: 52411
  GFR-binding peptide
  MOD_RES (4)..(5)..(38)..(40): Xaa is C or S
  MOD_RES (19)..(20)..(21)..(22)..(23): Xaa is A or G
  MOD_RES (24)..(25)..(26)..(27): Xaa is A or G or is absent

SEQ ID NO: 83940 - protein, 34 aa, Artificial Sequence; identical to SEQ ID NO: 19321
  GFR-binding peptide

SEQ ID NO: 83941 - protein, 38 aa, Artificial Sequence; identical to SEQ ID NO: 19322
  GFR-binding peptide
  MOD_RES (4)..(38): Xaa is C or S

SEQ ID NO: 83942 - protein, 33 aa, Artificial Sequence; identical to SEQ ID NO: 19323
  GFR-binding peptide
  MOD_RES (1)..(1): Xaa is C or S
  MOD_RES (15)..(16)..(17)..(18)..(19): Xaa is A or G
  MOD_RES (20)..(21)..(22)..(23): Xaa is A or G or is absent

SEQ ID NO: 83943 - protein, 43 aa, Artificial Sequence; identical to SEQ ID NO: 53587
  GFR-binding peptide
  MOD_RES (6)..(7)..(40)..(42): Xaa is C or S
  MOD_RES (21)..(22)..(23)..(24)..(25): Xaa is A or G
  MOD_RES (26)..(27)..(28)..(29): Xaa is A or G or is absent

SEQ ID NO: 83944 - protein, 36 aa, Artificial Sequence; identical to SEQ ID NO: 54783
  GFR-binding peptide
  MOD_RES (2)..(3)..(34)..(36): Xaa is C or S

SEQ ID NO: 83945 - protein, 37 aa, Artificial Sequence; identical to SEQ ID NO: 53591
  GFR-binding peptide
  MOD_RES (6)..(7): Xaa is C or S

SEQ ID NO: 83946 - protein, 39 aa, Artificial Sequence; identical to SEQ ID NO: 19324
  GFR-binding peptide
  MOD_RES (5)..(5): Xaa is C or S
  MOD_RES (21)..(22)..(23)..(24)..(25): Xaa is A or G
  MOD_RES (26)..(27)..(28)..(29): Xaa is A or G or is absent

SEQ ID NO: 83947 - protein, 37 aa, Artificial Sequence; identical to SEQ ID NO: 52424
  GFR-binding peptide
  MOD_RES (1)..(2)..(35)..(37): Xaa is C or S
  MOD_RES (16)..(17)..(18)..(19)..(20): Xaa is A or G
  MOD_RES (21)..(22)..(23)..(24): Xaa is A or G or is absent

SEQ ID NO: 83948 - protein, 42 aa, Artificial Sequence; identical to SEQ ID NO: 19325
  GFR-binding peptide
  MOD_RES (3)..(40)..(42): Xaa is C or S

SEQ ID NO: 83949 - protein, 39 aa, Artificial Sequence; identical to SEQ ID NO: 20041
  GFR-binding peptide
  MOD_RES (2)..(36)..(38): Xaa is C or S

SEQ ID NO: 83950 - protein, 42 aa, Artificial Sequence; identical to SEQ ID NO: 19328
  GFR-binding peptide
  MOD_RES (6)..(40)..(42): Xaa is C or S

SEQ ID NO: 83951 - protein, 37 aa, Artificial Sequence; identical to SEQ ID NO: 53595
  GFR-binding peptide
  MOD_RES (4)..(5): Xaa is C or S
  MOD_RES (19)..(20)..(21)..(22)..(23): Xaa is A or G
  MOD_RES (24)..(25)..(26)..(27): Xaa is A or G or is absent

SEQ ID NO: 83952 - protein, 39 aa, Artificial Sequence; identical to SEQ ID NO: 20044
  GFR-binding peptide
  MOD_RES (5)..(5): Xaa is C or S
  MOD_RES (21)..(22)..(23)..(24)..(25): Xaa is A or G
  MOD_RES (26)..(27)..(28)..(29): Xaa is A or G or is absent

SEQ ID NO: 83953 - protein, 35 aa, Artificial Sequence; identical to SEQ ID NO: 54790
  GFR-binding peptide
  MOD_RES (33)..(35): Xaa is C or S
  MOD_RES (14)..(15)..(16)..(17)..(18): Xaa is A or G
  MOD_RES (19)..(20)..(21)..(22): Xaa is A or G or is absent

SEQ ID NO: 83954 - protein, 41 aa, Artificial Sequence; identical to SEQ ID NO: 19329
  GFR-binding peptide
  MOD_RES (5)..(5): Xaa is C or S

SEQ ID NO: 83955 - protein, 42 aa, Artificial Sequence; identical to SEQ ID NO: 53598
  GFR-binding peptide
  MOD_RES (6)..(7)..(40)..(42): Xaa is C or S
  MOD_RES (21)..(22)..(23)..(24)..(25): Xaa is A or G
  MOD_RES (26)..(27)..(28)..(29): Xaa is A or G or is absent

SEQ ID NO: 83956 - protein, 35 aa, Artificial Sequence; identical to SEQ ID NO: 52430
  GFR-binding peptide
  MOD_RES (1)..(2)..(35): Xaa is C or S
  MOD_RES (16)..(17)..(18)..(19)..(20): Xaa is A or G
  MOD_RES (21)..(22)..(23)..(24): Xaa is A or G or is absent

SEQ ID NO: 83957 - protein, 35 aa, Artificial Sequence; identical to SEQ ID NO: 54794
  GFR-binding peptide
  MOD_RES (3)..(4)..(35): Xaa is C or S

SEQ ID NO: 83958 - protein, 36 aa, Artificial Sequence; identical to SEQ ID NO: 19331
  GFR-binding peptide
  MOD_RES (4)..(4): Xaa is C or S

SEQ ID NO: 83959 - protein, 40 aa, Artificial Sequence; identical to SEQ ID NO: 20045
  GFR-binding peptide
  MOD_RES (4)..(38)..(40): Xaa is C or S

SEQ ID NO: 83960 - protein, 34 aa, Artificial Sequence; identical to SEQ ID NO: 20046
  GFR-binding peptide

SEQ ID NO: 83961 - protein, 38 aa, Artificial Sequence; identical to SEQ ID NO: 20047
  GFR-binding peptide
  MOD_RES (1)..(35)..(37): Xaa is C or S
  MOD_RES (15)..(16)..(17)..(18)..(19): Xaa is A or G
  MOD_RES (20)..(21)..(22)..(23): Xaa is A or G or is absent

SEQ ID NO: 83962 - protein, 39 aa, Artificial Sequence; identical to SEQ ID NO: 54799
  GFR-binding peptide
  MOD_RES (2)..(3)..(36)..(38): Xaa is C or S
  MOD_RES (17)..(18)..(19)..(20)..(21): Xaa is A or G
  MOD_RES (22)..(23)..(24)..(25): Xaa is A or G or is absent

SEQ ID NO: 83963 - protein, 37 aa, Artificial Sequence; identical to SEQ ID NO: 19332
  GFR-binding peptide
  MOD_RES (2)..(2): Xaa is C or S

SEQ ID NO: 83964 - protein, 39 aa, Artificial Sequence; identical to SEQ ID NO: 19334
  GFR-binding peptide
  MOD_RES (37)..(39): Xaa is C or S
  MOD_RES (16)..(17)..(18)..(19)..(20): Xaa is A or G
  MOD_RES (21)..(22)..(23)..(24): Xaa is A or G or is absent

SEQ ID NO: 83965 - protein, 43 aa, Artificial Sequence; identical to SEQ ID NO: 19335
  GFR-binding peptide
  MOD_RES (4)..(41)..(43): Xaa is C or S

SEQ ID NO: 83966 - protein, 41 aa, Artificial Sequence; identical to SEQ ID NO: 19336
  GFR-binding peptide
  MOD_RES (2)..(39)..(41): Xaa is C or S
  MOD_RES (18)..(19)..(20)..(21)..(22): Xaa is A or G
  MOD_RES (23)..(24)..(25)..(26): Xaa is A or G or is absent

SEQ ID NO: 83967 - protein, 38 aa, Artificial Sequence; identical to SEQ ID NO: 20051
  GFR-binding peptide
  MOD_RES (4)..(38): Xaa is C or S

SEQ ID NO: 83968 - protein, 42 aa, Artificial Sequence; identical to SEQ ID NO: 20052
  GFR-binding peptide
  MOD_RES (3)..(40)..(42): Xaa is C or S

SEQ ID NO: 83969 - protein, 40 aa, Artificial Sequence; identical to SEQ ID NO: 53606
  GFR-binding peptide
  MOD_RES (5)..(6)..(39): Xaa is C or S
  MOD_RES (20)..(21)..(22)..(23)..(24): Xaa is A or G
  MOD_RES (25)..(26)..(27)..(28): Xaa is A or G or is absent

SEQ ID NO: 83970 - protein, 41 aa, Artificial Sequence; identical to SEQ ID NO: 20053
  GFR-binding peptide
  MOD_RES (7)..(41): Xaa is C or S

SEQ ID NO: 83971 - protein, 40 aa, Artificial Sequence; identical to SEQ ID NO: 20054
  GFR-binding peptide
  MOD_RES (5)..(5): Xaa is C or S
  MOD_RES (21)..(22)..(23)..(24)..(25): Xaa is A or G
  MOD_RES (26)..(27)..(28)..(29): Xaa is A or G or is absent

SEQ ID NO: 83972 - protein, 39 aa, Artificial Sequence; identical to SEQ ID NO: 20055
  GFR-binding peptide
  MOD_RES (4)..(4): Xaa is C or S
  MOD_RES (20)..(21)..(22)..(23)..(24): Xaa is A or G
  MOD_RES (25)..(26)..(27)..(28): Xaa is A or G or is absent

SEQ ID NO: 83973 - protein, 36 aa, Artificial Sequence; identical to SEQ ID NO: 19337
  GFR-binding peptide
  MOD_RES (3)..(3): Xaa is C or S
  MOD_RES (17)..(18)..(19)..(20)..(21): Xaa is A or G
  MOD_RES (22)..(23)..(24)..(25): Xaa is A or G or is absent

SEQ ID NO: 83974 - protein, 35 aa, Artificial Sequence; identical to SEQ ID NO: 19338
  GFR-binding peptide
  MOD_RES (34)..(34): Xaa is C or S
  MOD_RES (14)..(15)..(16)..(17)..(18): Xaa is A or G
  MOD_RES (19)..(20)..(21)..(22): Xaa is A or G or is absent

SEQ ID NO: 83975 - protein, 37 aa, Artificial Sequence; identical to SEQ ID NO: 56004
  GFR-binding peptide
  MOD_RES (4)..(5): Xaa is C or S
  MOD_RES (19)..(20)..(21)..(22)..(23): Xaa is A or G
  MOD_RES (24)..(25)..(26)..(27): Xaa is A or G or is absent

SEQ ID NO: 83976 - protein, 33 aa, Artificial Sequence; identical to SEQ ID NO: 53618
  GFR-binding peptide
  MOD_RES (2)..(3): Xaa is C or S

SEQ ID NO: 83977 - protein, 41 aa, Artificial Sequence; identical to SEQ ID NO: 19341
  GFR-binding peptide
  MOD_RES (6)..(40): Xaa is C or S

SEQ ID NO: 83978 - protein, 38 aa, Artificial Sequence; identical to SEQ ID NO: 54814
  GFR-binding peptide
  MOD_RES (2)..(3)..(36)..(38): Xaa is C or S
  MOD_RES (17)..(18)..(19)..(20)..(21): Xaa is A or G
  MOD_RES (22)..(23)..(24)..(25): Xaa is A or G or is absent

SEQ ID NO: 83979 - protein, 32 aa, Artificial Sequence; identical to SEQ ID NO: 56007
  GFR-binding peptide
  MOD_RES (31)..(31): Xaa is C or S

SEQ ID NO: 83980 - protein, 37 aa, Artificial Sequence; identical to SEQ ID NO: 56013
  GFR-binding peptide
  MOD_RES (5)..(6)..(37): Xaa is C or S

SEQ ID NO: 83981 - protein, 32 aa, Artificial Sequence; identical to SEQ ID NO: 53623
  GFR-binding peptide
  MOD_RES (1)..(2): Xaa is C or S

SEQ ID NO: 83982 - protein, 35 aa, Artificial Sequence; identical to SEQ ID NO: 20063
  GFR-binding peptide
  MOD_RES (1)..(35): Xaa is C or S

SEQ ID NO: 83983 - protein, 38 aa, Artificial Sequence; identical to SEQ ID NO: 19342
  GFR-binding peptide
  MOD_RES (2)..(2): Xaa is C or S
  MOD_RES (18)..(19)..(20)..(21)..(22): Xaa is A or G
  MOD_RES (23)..(24)..(25)..(26): Xaa is A or G or is absent

SEQ ID NO: 83984 - protein, 39 aa, Artificial Sequence; identical to SEQ ID NO: 54819
  GFR-binding peptide
  MOD_RES (6)..(7): Xaa is C or S
  MOD_RES (21)..(22)..(23)..(24)..(25): Xaa is A or G
  MOD_RES (26)..(27)..(28)..(29): Xaa is A or G or is absent

SEQ ID NO: 83985 - protein, 36 aa, Artificial Sequence; identical to SEQ ID NO: 19343
  GFR-binding peptide
  MOD_RES (4)..(4): Xaa is C or S

SEQ ID NO: 83986 - protein, 36 aa, Artificial Sequence; identical to SEQ ID NO: 53628
  GFR-binding peptide
  MOD_RES (3)..(4): Xaa is C or S
  MOD_RES (18)..(19)..(20)..(21)..(22): Xaa is A or G
  MOD_RES (23)..(24)..(25)..(26): Xaa is A or G or is absent

SEQ ID NO: 83987 - protein, 41 aa, Artificial Sequence; identical to SEQ ID NO: 20066
  GFR-binding peptide
  MOD_RES (2)..(39)..(41): Xaa is C or S

SEQ ID NO: 83988 - protein, 36 aa, Artificial Sequence; identical to SEQ ID NO: 54820
  GFR-binding peptide
  MOD_RES (3)..(4)..(35): Xaa is C or S

SEQ ID NO: 83989 - protein, 35 aa, Artificial Sequence; identical to SEQ ID NO: 19345
  GFR-binding peptide
  MOD_RES (1)..(35): Xaa is C or S
  MOD_RES (15)..(16)..(17)..(18)..(19): Xaa is A or G
  MOD_RES (20)..(21)..(22)..(23): Xaa is A or G or is absent

SEQ ID NO: 83990 - protein, 42 aa, Artificial Sequence; identical to SEQ ID NO: 54821
  GFR-binding peptide
  MOD_RES (5)..(6)..(39)..(41): Xaa is C or S
  MOD_RES (20)..(21)..(22)..(23)..(24): Xaa is A or G
  MOD_RES (25)..(26)..(27)..(28): Xaa is A or G or is absent

SEQ ID NO: 83991 - protein, 37 aa, Artificial Sequence; identical to SEQ ID NO: 20067
  GFR-binding peptide
  MOD_RES (34)..(36): Xaa is C or S

SEQ ID NO: 83992 - protein, 31 aa, Artificial Sequence; identical to SEQ ID NO: 56020
  GFR-binding peptide
  MOD_RES (1)..(1): Xaa is C or S

SEQ ID NO: 83993 - protein, 37 aa, Artificial Sequence; identical to SEQ ID NO: 20068
  GFR-binding peptide
  MOD_RES (2)..(36): Xaa is C or S

SEQ ID NO: 83994 - protein, 41 aa, Artificial Sequence; identical to SEQ ID NO: 54826
  GFR-binding peptide
  MOD_RES (4)..(5)..(38)..(40): Xaa is C or S
  MOD_RES (19)..(20)..(21)..(22)..(23): Xaa is A or G
  MOD_RES (24)..(25)..(26)..(27): Xaa is A or G or is absent

SEQ ID NO: 83995 - protein, 36 aa, Artificial Sequence; identical to SEQ ID NO: 52463
  GFR-binding peptide
  MOD_RES (1)..(2)..(35): Xaa is C or S
  MOD_RES (16)..(17)..(18)..(19)..(20): Xaa is A or G
  MOD_RES (21)..(22)..(23)..(24): Xaa is A or G or is absent

SEQ ID NO: 83996 - protein, 40 aa, Artificial Sequence; identical to SEQ ID NO: 19346
  GFR-binding peptide
  MOD_RES (3)..(40): Xaa is C or S
  MOD_RES (19)..(20)..(21)..(22)..(23): Xaa is A or G
  MOD_RES (24)..(25)..(26)..(27): Xaa is A or G or is absent

SEQ ID NO: 83997 - protein, 33 aa, Artificial Sequence; identical to SEQ ID NO: 20071
  GFR-binding peptide
  MOD_RES (14)..(15)..(16)..(17)..(18): Xaa is A or G
  MOD_RES (19)..(20)..(21)..(22): Xaa is A or G or is absent

SEQ ID NO: 83998 - protein, 38 aa, Artificial Sequence; identical to SEQ ID NO: 19348
  GFR-binding peptide
  MOD_RES (2)..(36)..(38): Xaa is C or S

SEQ ID NO: 83999 - protein, 34 aa, Artificial Sequence; identical to SEQ ID NO: 19350
  GFR-binding peptide
  MOD_RES (34)..(34): Xaa is C or S

SEQ ID NO: 84000 - protein, 36 aa, Artificial Sequence; identical to SEQ ID NO: 54834
  GFR-binding peptide
  MOD_RES (4)..(5)..(36): Xaa is C or S

SEQ ID NO: 84001 - protein, 37 aa, Artificial Sequence; identical to SEQ ID NO: 19351
  GFR-binding peptide
  MOD_RES (2)..(2): Xaa is C or S

SEQ ID NO: 84002 - protein, 39 aa, Artificial Sequence; identical to SEQ ID NO: 20075
  GFR-binding peptide
  MOD_RES (36)..(38): Xaa is C or S
  MOD_RES (15)..(16)..(17)..(18)..(19): Xaa is A or G
  MOD_RES (20)..(21)..(22)..(23): Xaa is A or G or is absent

SEQ ID NO: 84003 - protein, 41 aa, Artificial Sequence; identical to SEQ ID NO: 54835
  GFR-binding peptide
  MOD_RES (6)..(7)..(40): Xaa is C or S
  MOD_RES (21)..(22)..(23)..(24)..(25): Xaa is A or G
  MOD_RES (26)..(27)..(28)..(29): Xaa is A or G or is absent

SEQ ID NO: 84004 - protein, 35 aa, Artificial Sequence; identical to SEQ ID NO: 52471
  GFR-binding peptide
  MOD_RES (3)..(4)..(35): Xaa is C or S

SEQ ID NO: 84005 - protein, 38 aa, Artificial Sequence; identical to SEQ ID NO: 53654
  GFR-binding peptide
  MOD_RES (5)..(6)..(37): Xaa is C or S

SEQ ID NO: 84006 - protein, 35 aa, Artificial Sequence; identical to SEQ ID NO: 19353
  GFR-binding peptide
  MOD_RES (35)..(35): Xaa is C or S
  MOD_RES (14)..(15)..(16)..(17)..(18): Xaa is A or G
  MOD_RES (19)..(20)..(21)..(22): Xaa is A or G or is absent

SEQ ID NO: 84007 - protein, 37 aa, Artificial Sequence; identical to SEQ ID NO: 20079
  GFR-binding peptide
  MOD_RES (2)..(36): Xaa is C or S

SEQ ID NO: 84008 - protein, 43 aa, Artificial Sequence; identical to SEQ ID NO: 20080
  GFR-binding peptide
  MOD_RES (3)..(40)..(42): Xaa is C or S
  MOD_RES (19)..(20)..(21)..(22)..(23): Xaa is A or G
  MOD_RES (24)..(25)..(26)..(27): Xaa is A or G or is absent

SEQ ID NO: 84009 - protein, 37 aa, Artificial Sequence; identical to SEQ ID NO: 56037
  GFR-binding peptide
  MOD_RES (3)..(4)..(37): Xaa is C or S
  MOD_RES (18)..(19)..(20)..(21)..(22): Xaa is A or G
  MOD_RES (23)..(24)..(25)..(26): Xaa is A or G or is absent

SEQ ID NO: 84010 - protein, 40 aa, Artificial Sequence; identical to SEQ ID NO: 19356
  GFR-binding peptide
  MOD_RES (3)..(37)..(39): Xaa is C or S

SEQ ID NO: 84011 - protein, 39 aa, Artificial Sequence; identical to SEQ ID NO: 54844
  GFR-binding peptide
  MOD_RES (6)..(7)..(38): Xaa is C or S

SEQ ID NO: 84012 - protein, 43 aa, Artificial Sequence; identical to SEQ ID NO: 19357
  GFR-binding peptide
  MOD_RES (7)..(41)..(43): Xaa is C or S
  MOD_RES (21)..(22)..(23)..(24)..(25): Xaa is A or G
  MOD_RES (26)..(27)..(28)..(29): Xaa is A or G or is absent

SEQ ID NO: 84013 - protein, 41 aa, Artificial Sequence; identical to SEQ ID NO: 20082
  GFR-binding peptide
  MOD_RES (4)..(38)..(40): Xaa is C or S

SEQ ID NO: 84014 - protein, 36 aa, Artificial Sequence; identical to SEQ ID NO: 53667
  GFR-binding peptide
  MOD_RES (3)..(4): Xaa is C or S
  MOD_RES (18)..(19)..(20)..(21)..(22): Xaa is A or G
  MOD_RES (23)..(24)..(25)..(26): Xaa is A or G or is absent

SEQ ID NO: 84015 - protein, 39 aa, Artificial Sequence; identical to SEQ ID NO: 52481
  GFR-binding peptide
  MOD_RES (6)..(7): Xaa is C or S
  MOD_RES (21)..(22)..(23)..(24)..(25): Xaa is A or G
  MOD_RES (26)..(27)..(28)..(29): Xaa is A or G or is absent

SEQ ID NO: 84016 - protein, 39 aa, Artificial Sequence; identical to SEQ ID NO: 52482
  GFR-binding peptide
  MOD_RES (5)..(6)..(37)..(39): Xaa is C or S

SEQ ID NO: 84017 - protein, 40 aa, Artificial Sequence; identical to SEQ ID NO: 20084
  GFR-binding peptide
  MOD_RES (3)..(37)..(39): Xaa is C or S

SEQ ID NO: 84018 - protein, 37 aa, Artificial Sequence; identical to SEQ ID NO: 56042
  GFR-binding peptide
  MOD_RES (4)..(5): Xaa is C or S
  MOD_RES (19)..(20)..(21)..(22)..(23): Xaa is A or G
  MOD_RES (24)..(25)..(26)..(27): Xaa is A or G or is absent

SEQ ID NO: 84019 - protein, 39 aa, Artificial Sequence; identical to SEQ ID NO: 20085
  GFR-binding peptide
  MOD_RES (37)..(39): Xaa is C or S

SEQ ID NO: 84020 - protein, 37 aa, Artificial Sequence; identical to SEQ ID NO: 19359
  GFR-binding peptide
  MOD_RES (36)..(36): Xaa is C or S

SEQ ID NO: 84021 - protein, 39 aa, Artificial Sequence; identical to SEQ ID NO: 20087
  GFR-binding peptide
  MOD_RES (3)..(3): Xaa is C or S

SEQ ID NO: 84022 - protein, 40 aa, Artificial Sequence; identical to SEQ ID NO: 20088
  GFR-binding peptide
  MOD_RES (7)..(7): Xaa is C or S

SEQ ID NO: 84023 - protein, 44 aa, Artificial Sequence; identical to SEQ ID NO: 19361
  GFR-binding peptide
  MOD_RES (7)..(41)..(43): Xaa is C or S

SEQ ID NO: 84024 - protein, 39 aa, Artificial Sequence; identical to SEQ ID NO: 19362
  GFR-binding peptide
  MOD_RES (3)..(37)..(39): Xaa is C or S
  MOD_RES (17)..(18)..(19)..(20)..(21): Xaa is A or G
  MOD_RES (22)..(23)..(24)..(25): Xaa is A or G or is absent

SEQ ID NO: 84025 - protein, 39 aa, Artificial Sequence; identical to SEQ ID NO: 20090
  GFR-binding peptide
  MOD_RES (3)..(37)..(39): Xaa is C or S
  MOD_RES (17)..(18)..(19)..(20)..(21): Xaa is A or G
  MOD_RES (22)..(23)..(24)..(25): Xaa is A or G or is absent

SEQ ID NO: 84026 - protein, 38 aa, Artificial Sequence; identical to SEQ ID NO: 54862
  GFR-binding peptide
  MOD_RES (5)..(6): Xaa is C or S
  MOD_RES (20)..(21)..(22)..(23)..(24): Xaa is A or G
  MOD_RES (25)..(26)..(27)..(28): Xaa is A or G or is absent

SEQ ID NO: 84027 - protein, 35 aa, Artificial Sequence; identical to SEQ ID NO: 20093
  GFR-binding peptide
  MOD_RES (16)..(17)..(18)..(19)..(20): Xaa is A or G
  MOD_RES (21)..(22)..(23)..(24): Xaa is A or G or is absent

SEQ ID NO: 84028 - protein, 41 aa, Artificial Sequence; identical to SEQ ID NO: 20094
  GFR-binding peptide
  MOD_RES (3)..(40): Xaa is C or S
  MOD_RES (19)..(20)..(21)..(22)..(23): Xaa is A or G
  MOD_RES (24)..(25)..(26)..(27): Xaa is A or G or is absent

SEQ ID NO: 84029 - protein, 43 aa, Artificial Sequence; identical to SEQ ID NO: 20095
  GFR-binding peptide
  MOD_RES (4)..(41)..(43): Xaa is C or S
  MOD_RES (20)..(21)..(22)..(23)..(24): Xaa is A or G
  MOD_RES (25)..(26)..(27)..(28): Xaa is A or G or is absent

SEQ ID NO: 84030 - protein, 31 aa, Artificial Sequence; identical to SEQ ID NO: 56048
  GFR-binding peptide
  MOD_RES (31)..(31): Xaa is C or S

SEQ ID NO: 84031 - protein, 38 aa, Artificial Sequence; identical to SEQ ID NO: 20099
  GFR-binding peptide
  MOD_RES (3)..(37): Xaa is C or S

SEQ ID NO: 84032 - protein, 38 aa, Artificial Sequence; identical to SEQ ID NO: 54872
  GFR-binding peptide
  MOD_RES (6)..(7)..(38): Xaa is C or S

SEQ ID NO: 84033 - protein, 35 aa, Artificial Sequence; identical to SEQ ID NO: 54873
  GFR-binding peptide
  MOD_RES (1)..(2)..(33)..(35): Xaa is C or S

SEQ ID NO: 84034 - protein, 41 aa, Artificial Sequence; identical to SEQ ID NO: 20102
  GFR-binding peptide
  MOD_RES (1)..(38)..(40): Xaa is C or S
  MOD_RES (17)..(18)..(19)..(20)..(21): Xaa is A or G
  MOD_RES (22)..(23)..(24)..(25): Xaa is A or G or is absent

SEQ ID NO: 84035 - protein, 33 aa, Artificial Sequence; identical to SEQ ID NO: 56060
  GFR-binding peptide
  MOD_RES (2)..(3): Xaa is C or S

SEQ ID NO: 84036 - protein, 33 aa, Artificial Sequence; identical to SEQ ID NO: 56063
  GFR-binding peptide
  MOD_RES (33)..(33): Xaa is C or S
  MOD_RES (14)..(15)..(16)..(17)..(18): Xaa is A or G
  MOD_RES (19)..(20)..(21)..(22): Xaa is A or G or is absent

SEQ ID NO: 84037 - protein, 34 aa, Artificial Sequence; identical to SEQ ID NO: 20104
  GFR-binding peptide
  MOD_RES (1)..(1): Xaa is C or S
  MOD_RES (15)..(16)..(17)..(18)..(19): Xaa is A or G
  MOD_RES (20)..(21)..(22)..(23): Xaa is A or G or is absent

SEQ ID NO: 84038 - protein, 37 aa, Artificial Sequence; identical to SEQ ID NO: 19372
  GFR-binding peptide
  MOD_RES (4)..(4): Xaa is C or S

SEQ ID NO: 84039 - protein, 41 aa, Artificial Sequence; identical to SEQ ID NO: 20105
  GFR-binding peptide
  MOD_RES (4)..(38)..(40): Xaa is C or S
  MOD_RES (18)..(19)..(20)..(21)..(22): Xaa is A or G
  MOD_RES (23)..(24)..(25)..(26): Xaa is A or G or is absent

SEQ ID NO: 84040 - protein, 37 aa, Artificial Sequence; identical to SEQ ID NO: 19373
  GFR-binding peptide
  MOD_RES (3)..(37): Xaa is C or S

SEQ ID NO: 84041 - protein, 36 aa, Artificial Sequence; identical to SEQ ID NO: 56066
  GFR-binding peptide
  MOD_RES (1)..(34)..(36): Xaa is C or S
  MOD_RES (15)..(16)..(17)..(18)..(19): Xaa is A or G
  MOD_RES (20)..(21)..(22)..(23): Xaa is A or G or is absent

SEQ ID NO: 84042 - protein, 35 aa, Artificial Sequence; identical to SEQ ID NO: 20107
  GFR-binding peptide
  MOD_RES (1)..(35): Xaa is C or S
  MOD_RES (15)..(16)..(17)..(18)..(19): Xaa is A or G
  MOD_RES (20)..(21)..(22)..(23): Xaa is A or G or is absent

SEQ ID NO: 84043 - protein, 38 aa, Artificial Sequence; identical to SEQ ID NO: 20109
  GFR-binding peptide
  MOD_RES (4)..(38): Xaa is C or S
  MOD_RES (18)..(19)..(20)..(21)..(22): Xaa is A or G
  MOD_RES (23)..(24)..(25)..(26): Xaa is A or G or is absent

SEQ ID NO: 84044 - protein, 41 aa, Artificial Sequence; identical to SEQ ID NO: 54884
  GFR-binding peptide
  MOD_RES (6)..(7)..(40): Xaa is C or S
  MOD_RES (21)..(22)..(23)..(24)..(25): Xaa is A or G
  MOD_RES (26)..(27)..(28)..(29): Xaa is A or G or is absent

SEQ ID NO: 84045 - protein, 37 aa, Artificial Sequence; identical to SEQ ID NO: 19374
  GFR-binding peptide
  MOD_RES (34)..(36): Xaa is C or S

SEQ ID NO: 84046 - protein, 36 aa, Artificial Sequence; identical to SEQ ID NO: 52513
  GFR-binding peptide
  MOD_RES (1)..(34)..(36): Xaa is C or S
  MOD_RES (15)..(16)..(17)..(18)..(19): Xaa is A or G
  MOD_RES (20)..(21)..(22)..(23): Xaa is A or G or is absent

SEQ ID NO: 84047 - protein, 40 aa, Artificial Sequence; identical to SEQ ID NO: 20110
  GFR-binding peptide
  MOD_RES (5)..(5): Xaa is C or S

SEQ ID NO: 84048 - protein, 40 aa, Artificial Sequence; identical to SEQ ID NO: 54887
  GFR-binding peptide
  MOD_RES (5)..(6)..(39): Xaa is C or S
  MOD_RES (20)..(21)..(22)..(23)..(24): Xaa is A or G
  MOD_RES (25)..(26)..(27)..(28): Xaa is A or G or is absent

SEQ ID NO: 84049 - protein, 39 aa, Artificial Sequence; identical to SEQ ID NO: 52518
  GFR-binding peptide
  MOD_RES (5)..(6)..(37)..(39): Xaa is C or S

SEQ ID NO: 84050 - protein, 39 aa, Artificial Sequence; identical to SEQ ID NO: 54889
  GFR-binding peptide
  MOD_RES (3)..(4)..(37)..(39): Xaa is C or S
  MOD_RES (18)..(19)..(20)..(21)..(22): Xaa is A or G
  MOD_RES (23)..(24)..(25)..(26): Xaa is A or G or is absent

SEQ ID NO: 84051 - protein, 42 aa, Artificial Sequence; identical to SEQ ID NO: 53711
  GFR-binding peptide
  MOD_RES (6)..(7)..(40)..(42): Xaa is C or S
  MOD_RES (21)..(22)..(23)..(24)..(25): Xaa is A or G
  MOD_RES (26)..(27)..(28)..(29): Xaa is A or G or is absent

SEQ ID NO: 84052 - protein, 37 aa, Artificial Sequence; identical to SEQ ID NO: 52522
  GFR-binding peptide
  MOD_RES (3)..(4)..(35)..(37): Xaa is C or S

SEQ ID NO: 84053 - protein, 37 aa, Artificial Sequence; identical to SEQ ID NO: 56081
  GFR-binding peptide
  MOD_RES (5)..(6)..(37): Xaa is C or S

SEQ ID NO: 84054 - protein, 41 aa, Artificial Sequence; identical to SEQ ID NO: 20116
  GFR-binding peptide
  MOD_RES (4)..(41): Xaa is C or S

SEQ ID NO: 84055 - protein, 36 aa, Artificial Sequence; identical to SEQ ID NO: 20117
  GFR-binding peptide
  MOD_RES (3)..(3): Xaa is C or S

SEQ ID NO: 84056 - protein, 38 aa, Artificial Sequence; identical to SEQ ID NO: 19381
  GFR-binding peptide
  MOD_RES (1)..(35)..(37): Xaa is C or S

SEQ ID NO: 84057 - protein, 40 aa, Artificial Sequence; identical to SEQ ID NO: 20118
  GFR-binding peptide
  MOD_RES (1)..(38)..(40): Xaa is C or S
  MOD_RES (17)..(18)..(19)..(20)..(21): Xaa is A or G
  MOD_RES (22)..(23)..(24)..(25): Xaa is A or G or is absent

SEQ ID NO: 84058 - protein, 43 aa, Artificial Sequence; identical to SEQ ID NO: 19383
  GFR-binding peptide
  MOD_RES (3)..(40)..(42): Xaa is C or S

SEQ ID NO: 84059 - protein, 42 aa, Artificial Sequence; identical to SEQ ID NO: 19384
  GFR-binding peptide
  MOD_RES (2)..(39)..(41): Xaa is C or S
  MOD_RES (18)..(19)..(20)..(21)..(22): Xaa is A or G
  MOD_RES (23)..(24)..(25)..(26): Xaa is A or G or is absent

SEQ ID NO: 84060 - protein, 40 aa, Artificial Sequence; identical to SEQ ID NO: 54903
  GFR-binding peptide
  MOD_RES (6)..(7)..(40): Xaa is C or S
  MOD_RES (21)..(22)..(23)..(24)..(25): Xaa is A or G
  MOD_RES (26)..(27)..(28)..(29): Xaa is A or G or is absent

SEQ ID NO: 84061 - protein, 37 aa, Artificial Sequence; identical to SEQ ID NO: 20120
  GFR-binding peptide
  MOD_RES (34)..(36): Xaa is C or S
  MOD_RES (14)..(15)..(16)..(17)..(18): Xaa is A or G
  MOD_RES (19)..(20)..(21)..(22): Xaa is A or G or is absent

SEQ ID NO: 84062 - protein, 41 aa, Artificial Sequence; identical to SEQ ID NO: 53721
  GFR-binding peptide
  MOD_RES (6)..(7)..(40): Xaa is C or S
  MOD_RES (21)..(22)..(23)..(24)..(25): Xaa is A or G
  MOD_RES (26)..(27)..(28)..(29): Xaa is A or G or is absent

SEQ ID NO: 84063 - protein, 38 aa, Artificial Sequence; identical to SEQ ID NO: 56089
  GFR-binding peptide
  MOD_RES (5)..(6)..(37): Xaa is C or S

SEQ ID NO: 84064 - protein, 34 aa, Artificial Sequence; identical to SEQ ID NO: 56090
  GFR-binding peptide
  MOD_RES (2)..(3)..(34): Xaa is C or S

SEQ ID NO: 84065 - protein, 32 aa, Artificial Sequence; identical to SEQ ID NO: 20121
  GFR-binding peptide
  MOD_RES (14)..(15)..(16)..(17)..(18): Xaa is A or G
  MOD_RES (19)..(20)..(21)..(22): Xaa is A or G or is absent

SEQ ID NO: 84066 - protein, 31 aa, Artificial Sequence; identical to SEQ ID NO: 53725
  GFR-binding peptide
  MOD_RES (1)..(1): Xaa is C or S

SEQ ID NO: 84067 - protein, 37 aa, Artificial Sequence; identical to SEQ ID NO: 20122
  GFR-binding peptide
  MOD_RES (35)..(37): Xaa is C or S
  MOD_RES (14)..(15)..(16)..(17)..(18): Xaa is A or G
  MOD_RES (19)..(20)..(21)..(22): Xaa is A or G or is absent

SEQ ID NO: 84068 - protein, 42 aa, Artificial Sequence; identical to SEQ ID NO: 19389
  GFR-binding peptide
  MOD_RES (5)..(42): Xaa is C or S
  MOD_RES (21)..(22)..(23)..(24)..(25): Xaa is A or G
  MOD_RES (26)..(27)..(28)..(29): Xaa is A or G or is absent

SEQ ID NO: 84069 - protein, 40 aa, Artificial Sequence; identical to SEQ ID NO: 20123
  GFR-binding peptide
  MOD_RES (4)..(38)..(40): Xaa is C or S
  MOD_RES (18)..(19)..(20)..(21)..(22): Xaa is A or G
  MOD_RES (23)..(24)..(25)..(26): Xaa is A or G or is absent

SEQ ID NO: 84070 - protein, 36 aa, Artificial Sequence; identical to SEQ ID NO: 54905
  GFR-binding peptide
  MOD_RES (2)..(3)..(34)..(36): Xaa is C or S

SEQ ID NO: 84071 - protein, 39 aa, Artificial Sequence; identical to SEQ ID NO: 19390
  GFR-binding peptide
  MOD_RES (1)..(38): Xaa is C or S

SEQ ID NO: 84072 - protein, 37 aa, Artificial Sequence; identical to SEQ ID NO: 56093
  GFR-binding peptide
  MOD_RES (3)..(4)..(35)..(37): Xaa is C or S

SEQ ID NO: 84073 - protein, 38 aa, Artificial Sequence; identical to SEQ ID NO: 19391
  GFR-binding peptide
  MOD_RES (1)..(38): Xaa is C or S
  MOD_RES (17)..(18)..(19)..(20)..(21): Xaa is A or G
  MOD_RES (22)..(23)..(24)..(25): Xaa is A or G or is absent

SEQ ID NO: 84074 - protein, 34 aa, Artificial Sequence; identical to SEQ ID NO: 20125
  GFR-binding peptide
  MOD_RES (34)..(34): Xaa is C or S
  MOD_RES (14)..(15)..(16)..(17)..(18): Xaa is A or G
  MOD_RES (19)..(20)..(21)..(22): Xaa is A or G or is absent

SEQ ID NO: 84075 - protein, 37 aa, Artificial Sequence; identical to SEQ ID NO: 52542
  GFR-binding peptide
  MOD_RES (2)..(3)..(34)..(36): Xaa is C or S

SEQ ID NO: 84076 - protein, 36 aa, Artificial Sequence; identical to SEQ ID NO: 54909
  GFR-binding peptide
  MOD_RES (2)..(3)..(36): Xaa is C or S
  MOD_RES (17)..(18)..(19)..(20)..(21): Xaa is A or G
  MOD_RES (22)..(23)..(24)..(25): Xaa is A or G or is absent

SEQ ID NO: 84077 - protein, 37 aa, Artificial Sequence; identical to SEQ ID NO: 56098
  GFR-binding peptide
  MOD_RES (3)..(4)..(35)..(37): Xaa is C or S

SEQ ID NO: 84078 - protein, 38 aa, Artificial Sequence; identical to SEQ ID NO: 20129
  GFR-binding peptide
  MOD_RES (2)..(36)..(38): Xaa is C or S
  MOD_RES (16)..(17)..(18)..(19)..(20): Xaa is A or G
  MOD_RES (21)..(22)..(23)..(24): Xaa is A or G or is absent

SEQ ID NO: 84079 - protein, 38 aa, Artificial Sequence; identical to SEQ ID NO: 19397
  GFR-binding peptide
  MOD_RES (1)..(38): Xaa is C or S
  MOD_RES (17)..(18)..(19)..(20)..(21): Xaa is A or G
  MOD_RES (22)..(23)..(24)..(25): Xaa is A or G or is absent

SEQ ID NO: 84080 - protein, 42 aa, Artificial Sequence; identical to SEQ ID NO: 19398
  GFR-binding peptide
  MOD_RES (4)..(41): Xaa is C or S

SEQ ID NO: 84081 - protein, 39 aa, Artificial Sequence; identical to SEQ ID NO: 20131
  GFR-binding peptide
  MOD_RES (4)..(38): Xaa is C or S
  MOD_RES (18)..(19)..(20)..(21)..(22): Xaa is A or G
  MOD_RES (23)..(24)..(25)..(26): Xaa is A or G or is absent

SEQ ID NO: 84082 - protein, 35 aa, Artificial Sequence; identical to SEQ ID NO: 56102
  GFR-binding peptide
  MOD_RES (2)..(3)..(34): Xaa is C or S

SEQ ID NO: 84083 - protein, 36 aa, Artificial Sequence; identical to SEQ ID NO: 20132
  GFR-binding peptide
  MOD_RES (1)..(1): Xaa is C or S
  MOD_RES (17)..(18)..(19)..(20)..(21): Xaa is A or G
  MOD_RES (22)..(23)..(24)..(25): Xaa is A or G or is absent

SEQ ID NO: 84084 - protein, 38 aa, Artificial Sequence; identical to SEQ ID NO: 56105
  GFR-binding peptide
  MOD_RES (6)..(7)..(38): Xaa is C or S

SEQ ID NO: 84085 - protein, 35 aa, Artificial Sequence; identical to SEQ ID NO: 54924
  GFR-binding peptide
  MOD_RES (1)..(2)..(35): Xaa is C or S
  MOD_RES (16)..(17)..(18)..(19)..(20): Xaa is A or G
  MOD_RES (21)..(22)..(23)..(24): Xaa is A or G or is absent

SEQ ID NO: 84086 - protein, 39 aa, Artificial Sequence; identical to SEQ ID NO: 19402
  GFR-binding peptide
  MOD_RES (6)..(6): Xaa is C or S
  MOD_RES (20)..(21)..(22)..(23)..(24): Xaa is A or G
  MOD_RES (25)..(26)..(27)..(28): Xaa is A or G or is absent

SEQ ID NO: 84087 - protein, 43 aa, Artificial Sequence; identical to SEQ ID NO: 56106
  GFR-binding peptide
  MOD_RES (6)..(7)..(40)..(42): Xaa is C or S
  MOD_RES (21)..(22)..(23)..(24)..(25): Xaa is A or G
  MOD_RES (26)..(27)..(28)..(29): Xaa is A or G or is absent

SEQ ID NO: 84088 - protein, 41 aa, Artificial Sequence; identical to SEQ ID NO: 20134
  GFR-binding peptide
  MOD_RES (6)..(40): Xaa is C or S
  MOD_RES (20)..(21)..(22)..(23)..(24): Xaa is A or G
  MOD_RES (25)..(26)..(27)..(28): Xaa is A or G or is absent

SEQ ID NO: 84089 - protein, 34 aa, Artificial Sequence; identical to SEQ ID NO: 20136
  GFR-binding peptide
  MOD_RES (34)..(34): Xaa is C or S

SEQ ID NO: 84090 - protein, 34 aa, Artificial Sequence; identical to SEQ ID NO: 53743
  GFR-binding peptide
  MOD_RES (1)..(34): Xaa is C or S
  MOD_RES (15)..(16)..(17)..(18)..(19): Xaa is A or G
  MOD_RES (20)..(21)..(22)..(23): Xaa is A or G or is absent

SEQ ID NO: 84091 - protein, 41 aa, Artificial Sequence; identical to SEQ ID NO: 20138
  GFR-binding peptide
  MOD_RES (5)..(39)..(41): Xaa is C or S
  MOD_RES (19)..(20)..(21)..(22)..(23): Xaa is A or G
  MOD_RES (24)..(25)..(26)..(27): Xaa is A or G or is absent

SEQ ID NO: 84092 - protein, 38 aa, Artificial Sequence; identical to SEQ ID NO: 52567
  GFR-binding peptide
  MOD_RES (1)..(2)..(35)..(37): Xaa is C or S
  MOD_RES (16)..(17)..(18)..(19)..(20): Xaa is A or G
  MOD_RES (21)..(22)..(23)..(24): Xaa is A or G or is absent

SEQ ID NO: 84093 - protein, 39 aa, Artificial Sequence; identical to SEQ ID NO: 19403
  GFR-binding peptide
  MOD_RES (2)..(36)..(38): Xaa is C or S

SEQ ID NO: 84094 - protein, 37 aa, Artificial Sequence; identical to SEQ ID NO: 56114
  GFR-binding peptide
  MOD_RES (4)..(5)..(36): Xaa is C or S

SEQ ID NO: 84095 - protein, 38 aa, Artificial Sequence; identical to SEQ ID NO: 56118
  GFR-binding peptide
  MOD_RES (1)..(2)..(35)..(37): Xaa is C or S
  MOD_RES (16)..(17)..(18)..(19)..(20): Xaa is A or G
  MOD_RES (21)..(22)..(23)..(24): Xaa is A or G or is absent

SEQ ID NO: 84096 - protein, 42 aa, Artificial Sequence; identical to SEQ ID NO: 54930
  GFR-binding peptide
  MOD_RES (5)..(6)..(39)..(41): Xaa is C or S
  MOD_RES (20)..(21)..(22)..(23)..(24): Xaa is A or G
  MOD_RES (25)..(26)..(27)..(28): Xaa is A or G or is absent

SEQ ID NO: 84097 - protein, 35 aa, Artificial Sequence; identical to SEQ ID NO: 52575
  GFR-binding peptide
  MOD_RES (2)..(3)..(34): Xaa is C or S

SEQ ID NO: 84098 - protein, 37 aa, Artificial Sequence; identical to SEQ ID NO: 20143
  GFR-binding peptide
  MOD_RES (3)..(37): Xaa is C or S

SEQ ID NO: 84099 - protein, 41 aa, Artificial Sequence; identical to SEQ ID NO: 20144
  GFR-binding peptide
  MOD_RES (7)..(41): Xaa is C or S
  MOD_RES (21)..(22)..(23)..(24)..(25): Xaa is A or G
  MOD_RES (26)..(27)..(28)..(29): Xaa is A or G or is absent

SEQ ID NO: 84100 - protein, 34 aa, Artificial Sequence; identical to SEQ ID NO: 53754
  GFR-binding peptide
  MOD_RES (31)..(33): Xaa is C or S

SEQ ID NO: 84101 - protein, 38 aa, Artificial Sequence; identical to SEQ ID NO: 52576
  GFR-binding peptide
  MOD_RES (4)..(5)..(36)..(38): Xaa is C or S

SEQ ID NO: 84102 - protein, 37 aa, Artificial Sequence; identical to SEQ ID NO: 19406
  GFR-binding peptide
  MOD_RES (2)..(36): Xaa is C or S
  MOD_RES (16)..(17)..(18)..(19)..(20): Xaa is A or G
  MOD_RES (21)..(22)..(23)..(24): Xaa is A or G or is absent

SEQ ID NO: 84103 - protein, 44 aa, Artificial Sequence; identical to SEQ ID NO: 19407
  GFR-binding peptide
  MOD_RES (7)..(41)..(43): Xaa is C or S
  MOD_RES (21)..(22)..(23)..(24)..(25): Xaa is A or G
  MOD_RES (26)..(27)..(28)..(29): Xaa is A or G or is absent

SEQ ID NO: 84104 - protein, 37 aa, Artificial Sequence; identical to SEQ ID NO: 20145
  GFR-binding peptide
  MOD_RES (3)..(37): Xaa is C or S
  MOD_RES (17)..(18)..(19)..(20)..(21): Xaa is A or G
  MOD_RES (22)..(23)..(24)..(25): Xaa is A or G or is absent

SEQ ID NO: 84105 - protein, 40 aa, Artificial Sequence; identical to SEQ ID NO: 56125
  GFR-binding peptide
  MOD_RES (3)..(4)..(37)..(39): Xaa is C or S
  MOD_RES (18)..(19)..(20)..(21)..(22): Xaa is A or G
  MOD_RES (23)..(24)..(25)..(26): Xaa is A or G or is absent

SEQ ID NO: 84106 - protein, 38 aa, Artificial Sequence; identical to SEQ ID NO: 20148
  GFR-binding peptide
  MOD_RES (4)..(4): Xaa is C or S
  MOD_RES (20)..(21)..(22)..(23)..(24): Xaa is A or G
  MOD_RES (25)..(26)..(27)..(28): Xaa is A or G or is absent

SEQ ID NO: 84107 - protein, 40 aa, Artificial Sequence; identical to SEQ ID NO: 20149
  GFR-binding peptide
  MOD_RES (3)..(37)..(39): Xaa is C or S
  MOD_RES (17)..(18)..(19)..(20)..(21): Xaa is A or G
  MOD_RES (22)..(23)..(24)..(25): Xaa is A or G or is absent

SEQ ID NO: 84108 - protein, 38 aa, Artificial Sequence; identical to SEQ ID NO: 20150
  GFR-binding peptide
  MOD_RES (37)..(37): Xaa is C or S
  MOD_RES (16)..(17)..(18)..(19)..(20): Xaa is A or G
  MOD_RES (21)..(22)..(23)..(24): Xaa is A or G or is absent

SEQ ID NO: 84109 - protein, 7 aa, Artificial Sequence
  Building block peptide "PEP"
  MOD_RES (6)..(7): Xaa is C or S
KIPKAXX

SEQ ID NO: 84110 - protein, 7 aa, Artificial Sequence
  Building block peptide "PEP"
  MOD_RES (6)..(7): Xaa is C or S
GIPEPXX

SEQ ID NO: 84111 - protein, 7 aa, Artificial Sequence
  Building block peptide "PEP"
  MOD_RES (6)..(7): Xaa is C or S
SIPKAXX

SEQ ID NO: 84112 - protein, 7 aa, Artificial Sequence
  Building block peptide "PEP"
  MOD_RES (7)..(7): Xaa is C or S
HVTKPTX

SEQ ID NO: 84113 - protein, 7 aa, Artificial Sequence
  Building block peptide "PEP"
  MOD_RES (6)..(7): Xaa is C or S
YVPKPXX

SEQ ID NO: 84114 - protein, 7 aa, Artificial Sequence
  Building block peptide "PEP"
  MOD_RES (6)..(7): Xaa is C or S
TVPKPXX

SEQ ID NO: 84115 - protein, 7 aa, Artificial Sequence
  Building block peptide "PEP"
  MOD_RES (6)..(7): Xaa is C or S
AVPKAXX

SEQ ID NO: 84116 - protein, 7 aa, Artificial Sequence
  Building block peptide "PEP"
  MOD_RES (6)..(7): Xaa is C or S
KVGKAXX

SEQ ID NO: 84117 - protein, 7 aa, Artificial Sequence
  Building block peptide "PEP"
  MOD_RES (6)..(7): Xaa is C or S
KASKAXX

SEQ ID NO: 84118 - protein, 7 aa, Artificial Sequence
  Building block peptide "PEP"
  MOD_RES (6)..(7): Xaa is C or S
GSAGPXX

SEQ ID NO: 84119 - protein, 7 aa, Artificial Sequence
  Building block peptide "PEP"
  MOD_RES (6)..(7): Xaa is C or S
AAPASXX

SEQ ID NO: 84120 - protein, 7 aa, Artificial Sequence
  Building block peptide "PEP"
  MOD_RES (6)..(7): Xaa is C or S
STPPTXX

SEQ ID NO: 84121 - protein, 7 aa, Artificial Sequence
  Building block peptide "PEP"
  MOD_RES (6)..(7): Xaa is C or S
HVPKPXX

SEQ ID NO: 84122 - protein, 7 aa, Artificial Sequence
  Building block peptide "PEP"
  MOD_RES (6)..(7): Xaa is C or S
RVPSTXX

SEQ ID NO: 84123 - protein, 7 aa, Artificial Sequence
  Building block peptide "PEP"
  MOD_RES (6)..(7): Xaa is C or S
ASAAPXX

SEQ ID NO: 84124 - protein, 7 aa, Artificial Sequence
  Building block peptide "PEP"
  MOD_RES (6)..(7): Xaa is C or S
ASASPXX

SEQ ID NO: 84125 - protein, 7 aa, Artificial Sequence
  Building block peptide "PEP"
  MOD_RES (7)..(7): Xaa is C or S
NDEGLEX

SEQ ID NO: 84126 - protein, 7 aa, Artificial Sequence
  Building block peptide "PEP"
  MOD_RES (5)..(5): Xaa is C or S
SSVKXQP

SEQ ID NO: 84127 - protein, 7 aa, Artificial Sequence
  Building block peptide "PEP"
  MOD_RES (5)..(5): Xaa is C or S
RNVQXRP

SEQ ID NO: 84128 - protein, 4 aa, Artificial Sequence
  Building block peptide "PEP"
SAIS

SEQ ID NO: 84129 - protein, 4 aa, Artificial Sequence
  Building block peptide "PEP"
SSLS

SEQ ID NO: 84130 - protein, 4 aa, Artificial Sequence
  Building block peptide "PEP"
NAIS

SEQ ID NO: 84131 - protein, 4 aa, Artificial Sequence
  Building block peptide "PEP"
SATS

SEQ ID NO: 84132 - protein, 4 aa, Artificial Sequence
  Building block peptide "PEP"
SPIS

SEQ ID NO: 84133 - protein, 4 aa, Artificial Sequence
  Building block peptide "PEP"
EPIS

SEQ ID NO: 84134 - protein, 4 aa, Artificial Sequence
  Building block peptide "PEP"
SPIN

SEQ ID NO: 84135 - protein, 4 aa, Artificial Sequence
  Building block peptide "PEP"
KPLS

SEQ ID NO: 84136 - protein, 4 aa, Artificial Sequence
  Building block peptide "PEP"
EPLP

SEQ ID NO: 84137 - protein, 4 aa, Artificial Sequence
  Building block peptide "PEP"
EPLT

SEQ ID NO: 84138 - protein, 4 aa, Artificial Sequence
  Building block peptide "PEP"
SNIT

SEQ ID NO: 84139 - protein, 4 aa, Artificial Sequence
  Building block peptide "PEP"
RSVK

SEQ ID NO: 84140 - protein, 4 aa, Artificial Sequence
  Building block peptide "PEP"
RPVQ

SEQ ID NO: 84141 - protein, 7 aa, Artificial Sequence
  Building block peptide "PEP"
DENEKVV

SEQ ID NO: 84142 - protein, 7 aa, Artificial Sequence
  Building block peptide "PEP"
DENKNVV

SEQ ID NO: 84143 - protein, 7 aa, Artificial Sequence
  Building block peptide "PEP"
DEYDKVV

SEQ ID NO: 84144 - protein, 7 aa, Artificial Sequence
  Building block peptide "PEP"
DDSSNVI

SEQ ID NO: 84145 - protein, 7 aa, Artificial Sequence
  Building block peptide "PEP"
DSSNNVI

SEQ ID NO: 84146 - protein, 7 aa, Artificial Sequence
  Building block peptide "PEP"
DDMGVPT

SEQ ID NO: 84147 - protein, 7 aa, Artificial Sequence
  Building block peptide "PEP"
DKGVVTY

SEQ ID NO: 84148 - protein, 7 aa, Artificial Sequence
  Building block peptide "PEP"
NDKQQII

SEQ ID NO: 84149 - protein, 7 aa, Artificial Sequence
  Building block peptide "PEP"
DAANNVV

SEQ ID NO: 84150 - protein, 7 aa, Artificial Sequence
  Building block peptide "PEP"
DSANNVV

SEQ ID NO: 84151 - protein, 7 aa, Artificial Sequence
  Building block peptide "PEP"
DNGRVLL

SEQ ID NO: 84152 - protein, 7 aa, Artificial Sequence
  Building block peptide "PEP"
VGRKPKV

SEQ ID NO: 84153 - protein, 7 aa, Artificial Sequence
  Building block peptide "PEP"
IGKTPKI

SEQ ID NO: 84154 - protein, 7 aa, Artificial Sequence
  Building block peptide "PEP"
VGRTPKV

SEQ ID NO: 84155 - protein, 9 aa, Artificial Sequence
  Building block peptide "PEP"
RIKPHQGQH

SEQ ID NO: 84156 - protein, 9 aa, Artificial Sequence
  Building block peptide "PEP"
EYVRKKPKL

SEQ ID NO: 84157 - protein, 9 aa, Artificial Sequence
  Building block peptide "PEP"
EIVRKKPIF

SEQ ID NO: 84158 - protein, 5 aa, Artificial Sequence
  Building block peptide "PEP"
LKNYQ

SEQ ID NO: 84159 - protein, 5 aa, Artificial Sequence
  Building block peptide "PEP"
LKVYP

SEQ ID NO: 84160 - protein, 5 aa, Artificial Sequence
  Building block peptide "PEP"
LKKYR

SEQ ID NO: 84161 - protein, 5 aa, Artificial Sequence
  Building block peptide "PEP"
LRKHR

SEQ ID NO: 84162 - protein, 5 aa, Artificial Sequence
  Building block peptide "PEP"
LKYHY

SEQ ID NO: 84163 - protein, 5 aa, Artificial Sequence
  Building block peptide "PEP"
KFKYE

SEQ ID NO: 84164 - protein, 5 aa, Artificial Sequence
  Building block peptide "PEP"
YGKIP

SEQ ID NO: 84165 - protein, 5 aa, Artificial Sequence
  Building block peptide "PEP"
YKQYE

SEQ ID NO: 84166 - protein, 5 aa, Artificial Sequence
  Building block peptide "PEP"
DHHKD

SEQ ID NO: 84167 - protein, 5 aa, Artificial Sequence
  Building block peptide "PEP"
EQLSN

SEQ ID NO: 84168 - protein, 5 aa, Artificial Sequence
  Building block peptide "PEP"
IGEMS

SEQ ID NO: 84169 - protein, 5 aa, Artificial Sequence
  Building block peptide "PEP"
LGEMS

SEQ ID NO: 84170 - protein, 5 aa, Artificial Sequence
  Building block peptide "PEP"
KEVQV

SEQ ID NO: 84171 - protein, 5 aa, Artificial Sequence
  Building block peptide "PEP"
KKATV

SEQ ID NO: 84172 - protein, 5 aa, Artificial Sequence
  Building block peptide "PEP"
  MOD_RES (2)..(4): Xaa is C or S
GXGXR

SEQ ID NO: 84173 - protein, 5 aa, Artificial Sequence
  Building block peptide "PEP"
  MOD_RES (2)..(4): Xaa is C or S
SXAXR

SEQ ID NO: 84174 - protein, 5 aa, Artificial Sequence
  Building block peptide "PEP"
  MOD_RES (2)..(4): Xaa is C or S
SXGXH

SEQ ID NO: 84175 - protein, 5 aa, Artificial Sequence
  Building block peptide "PEP"
  MOD_RES (2)..(4): Xaa is C or S
AXGXH

SEQ ID NO: 84176 - protein, 4 aa, Artificial Sequence
  Building block peptide "PEP"
  MOD_RES (1)..(3): Xaa is C or S
XGXR

SEQ ID NO: 84177 - protein, 5 aa, Artificial Sequence
  Building block peptide "PEP"
  MOD_RES (2)..(4): Xaa is C or S
EXGXR

SEQ ID NO: 84178 - protein, 5 aa, Artificial Sequence
  Building block peptide "PEP"
  MOD_RES (2)..(4): Xaa is C or S
RXGXS

SEQ ID NO: 84179 - protein, 5 aa, Artificial Sequence
  Building block peptide "PEP"
  MOD_RES (2)..(4): Xaa is C or S
AXGXR

SEQ ID NO: 84180 - protein, 5 aa, Artificial Sequence
  Building block peptide "PEP"
  MOD_RES (2)..(4): Xaa is C or S
SXGXR

SEQ ID NO: 84181 - protein, 4 aa, Artificial Sequence
  Building block peptide "PEP"
  MOD_RES (1)..(3): Xaa is C or S
XGXL

SEQ ID NO: 84182 - protein, 4 aa, Artificial Sequence
  Building block peptide "PEP"
  MOD_RES (1)..(3): Xaa is C or S
XKXS

SEQ ID NO: 84183 - protein, 5 aa, Artificial Sequence
  Building block peptide "PEP"
  MOD_RES (2)..(4): Xaa is C or S
KXEXR

SEQ ID NO: 84184 - protein, 5 aa, Artificial Sequence
  Building block peptide "PEP"
  MOD_RES (2)..(4): Xaa is C or S
QXEXR

SEQ ID NO: 84185 - protein, 6 aa, Artificial Sequence
  Building block peptide "PEP"
  MOD_RES (3)..(5): Xaa is C or S
LEXAXA

SEQ ID NO: 84186 - protein, 6 aa, Artificial Sequence
  Building block peptide "PEP"
  MOD_RES (3)..(5): Xaa is C or S
LAXKXE
